United States Patent Application Publication US 2020/0405807 A1 - sequence listing, part 2

SEQ ID NO: 3339 - protein, 901 aa, Agaricus bisporus
  var. bisporus
  strain H97 / ATCC MYA-4626 / FGSC 10389
MPFNLDNIAALSNQHPKPTYYQYQYGTAGFRTLGDRLDSVVFRIGILAALRSMKHNSHAIGVMVTASHNPEQDNGVKLIDPRGEMLEASWEVHATTIANARTTEELVNVIQHIIDVVNIDTTRPAVVIYGRDTRPTGESLVAALQDGIRAAGADGRDAGITTTPIIHYLVRATNSKDFGEPTEIGYYTKMIDAFKKLVAGRPKISPLLVDCANGVGYIAADKVKKYLGDTLSLILENTSTATAGALNNSCGADYVKTTQRLPPSLNGKLTPVQRGCSLDGDADRLIYFYIDEKRQFRMLDGDKIASLVATFIVDLVRAAGLQGQIKVGTVQTAYANGSSTKFLAQRLPVKCVPTGVKYLHHAAESFDVGVYFEANGHGTVLFSRNTQETLEKHEPKTPAQQTALNHIINLTKLINQTVGDALSDMLLVEVVLAHRSYTGVEWDSLYTDLPNRLVKVVVNDRNAFVTTDAERRLVSPPLLQQRIDELVLKYDGGRTFVRPSGTEDVVRVYAEASTRVQADDLAYRIAGMVYDEAGVAICLAPTAHPLFLLSMCRFVIYKGTSPVQLSHLLTRPCHSIINQAFDSRLRLDRRRPMNGDGFGVGWYDSVYDPELGGQPCIFTSVTPAWNNANLARLAVKIKSPLVFAHVRATTAGSLSLDNCHPFAYENLMFMHNGNIADFHLFKRRLQADLPDHLFSFVQGNTDSEWSFALFLSKVPDPNARSFSPEILRNAMLETITSLNQYAEDAGVTEPSLMNFCVTDGSSIVVSRYISSRKDEAASLWFSSGTEFNEYAEGGHYRMSKSDKRENIIMIASEPLTFERADWMEIKTNHLVVITPKMNLLQIPIEDKYFVSPSDPASLARDTDFAEEKGLLNPLTRQSKLAHDAAATAHESPFKRQVTAEH

SEQ ID NO: 3340 - protein, 896 aa, Agaricus bisporus
  var. bisporus
  strain H97 / ATCC MYA-4626 / FGSC 10389
MGDFKPSPNSSQTRIDNYGDPFADRPRQTQFVEPERPYGSSASARPFESSASLPQDLGGGFDDEEYVEKLPLNTGGNFAGGFYPPGPVDPSAYGDSHIHPGRPSSVVSTSTNGVDSAWRRRQTIKRGVTRKVKLTQGNFIAEYPVPTPILNAVEDKWKSTNKTEFSHMRYTAATVDPDEFSEENGWSLRTKMYNRDTEILIAVTSYNEDKTLYARTLHGVMLNIRDICKTKQSKYWRRHAEEGTPGWQKITVALIVDGLEPMDKTVLDILATIGVYQDGVMKKQVDGKDTVAHIFEYTTQLSVDATPQLVLPRAEDPNNLVPVQIIFVLKAQNQKKINSHRWLFNAIGRMLNPEICVLIDAGTKPGHKSIYYLWEAFYNDPHLGGCCGEIHAMIKGGKKLLNPLVAAQNFEYKMSNILDKPLESSFGYVSVLPGAFSAYRFQAITGCPLEQYFHGDHSLADRLGPKGIYGMNIFTKNMFLAEDRILCFELVAKAKDRWTLTYVKPSKAETDVPESAAELIGQRRRWLNGSFAASVYALVNFFKLYRSGHGIIRMFFLHIQGLYNVFSLIFSWFALANMWLTFSIIIDLVPSQGIVIFGTETVTHWVNLSFKWLYLSFLALQFILALGNRPKGERMAYVATLWVYGFLAVYLLVCSFALTIKAFKNIPNELSFEGKSAGEIVLQFFEPPVGALIAAMISTYGIYLVASFLYRDPWHMFSSFLQYLCLAPSFTNVLNVYAFCNLHDVSWGTKGSDKAEALPSVSSSKTKGADMAVVEDTTKIQEDVDAAFKETVTRAITKIESKEVVEKPTMDDQNKTFRTRLVSLWMLSNATLAIAIENISGLPSKDPSVDADTLQKRQSTYFAIILYSTFGLAMVRFIGCLFYFFKRNLFRCCRKN

SEQ ID NO: 3341 - protein, 926 aa, Agaricus bisporus
  var. bisporus
  strain H97 / ATCC MYA-4626 / FGSC 10389
MRGRGAPDRGRGGGYGGARGTPSRGRGGNRGRGSAGGGRGVPAGIYSPPNRPIAIDARLRDGSQKQVMAGLKSAPINEKGLPLRLDLGTKGREIALRTNYFAMTIPKGPFYDYEVVTTPAVSIRRVRRRIFEIAEDTEPWKKILAGCVAHDHSAKLVASKLLPQPLSIDVPFYEEDDDPPAKGSQPRKMYTLSIKFARELETESLRKVIAGDPQYSAHDIMPIISAFNLILAAWPTRSGAGGVMVGRNKFFMPGTGVPMPLGGGLEAVRGFYSSVRTAHQALMVNVNVCTTAFYRSGNLATALIEFLKINSRPTTFVKGLRVKATHLGYRKTIKEATEYTAKTYVFKTEDYGEISVEEYFLKRYKIKLQHPNLPLVDVGGQKVNYLPTELCEILPNQPYRGKLLDEHTAAMIRYAAQPPNANAHAIETQGLKELGFTQNAPTLNAFGVGISQAMATVPGRVVPPPKIKYKGEKELDGRSFRSDKASWNLREVKFVKGATLAKWAVLLIRDGSHTEFNGPSDPELRSALKSFSEVCGKSGLNITSLPTIAEVHLPPYDRTDLGRGKAIHIIHSMLPKMFNQKPQIIFTILSNTDKHIYSGLKRLFDVTLDLPSVCAQAERLRNGGPQYYSNVSLKFNMKLGGVNHVLDKTSVTWLGEMPTMVVGIDVTHPGVIAVKGTPSIAAVVASVDRDCVQFPASLRRQESRKEMVTDLKEMMIERLNAFHSKSGRYPERILIYRDGVSEGQFASVIEEELPAVVEACRAVKMKSRPKLTIVVCAKRHHTRFFPTSEKDVDDKFNPLPGTVVDQGVTTVYNFDFYLQAHGSLQGSSKPTHYFVIHDENGFIPDKLQALTNSISYMFARATKAVSLVSPAYYADLACERGRCYLHELLNGIRSGPIDEEKAWKDAAKYWGNGPTGSAMKNIMFYL

SEQ ID NO: 3342 - protein, 1012 aa, Agaricus bisporus
  var. bisporus
  strain H97 / ATCC MYA-4626 / FGSC 10389
MLSRRVVVGRLSTLARASRSLRPTPPPLIRRGYALARGPSHNDPFANGTNAYYADEMYRLWRQDPKSVHTSWDVYFSGLDQGMPSHHAFQPPPTTHLPHPADGAPALHAGDGAELNDHLKVQLLVRAYQVRGHHVAELDPLGILDTDLADVRPPELELSRYGFTERDLEKDITLGPGILPHFATEGNKTMKLKDIIRTLKRIYCGHVGIQYVHIPDKEQCDWIRERVETPKPWNYTVEEKRMILDRLIWSESFEKFMASKYPNEKRFGLEGCEALVPGMKALIDRSVETGVKHITMGMPHRGRLNVLANVIRKPIEAILNEFSGDEDDNWPAGDVKYHLGANYVRPTPSGKKVSLSLVANPSHLEAADPVVLGKTRAIQHFENDEIAHTTAMGVLLHGDASFAGQGVVYETMGLHSLPSYGTGGTIHLIVNNQIGFTTDPRFARSTPYPSDIAKSIDAPIFHVNGDNVEAVNFVCQLAADYRAKFKKDVVIDIVCYRRYGHNETDQPSFTQPRMYEAIKNQPTPLTKYTKFLVGRGTFTEKDIEEHKKWVWGMLETAANGAKDYVPTSKEWLSAAWTGFPSPRQLAEQALPTRATGSDVPTLRQIGKAISTFPQGFTTHRNLARILNARGKTVEEGTNIDWSTAEALAFGTLALEKIHVRLSGQDVERGTFSQRHAVIHDQANEQQYVPLNDLGSNQARFVVCNSSLSEFGTLGFELGYSLVSPDSLTIWEAQFGDFANNAQCIIDQFIAAGERKWLQRTGLVVSLPHGYDGQGPEHSSGRIERFLQLCDDHPHIYPSPEKIERQHQDCNMQVVYPTTPANYFHVLRRQIHRDFRKPLIVFFSKSLLRHPKARSSLDEMVGETHFERYIPEASEDLVAPDQVKRHILCSGQVYYALLQAREERGIKDVAISRIEQLSPFPYDMVTSHLDKYPNADLLWCQEEPMNNGAWTYIGPRIYTAASRTQNHKGKYPYYAGREPTSSVATGSKTQHKKETEAFVNTAFDTWTEMHHLK

SEQ ID NO: 3343 - protein, 1048 aa, Agaricus bisporus
  var. bisporus
  strain H97 / ATCC MYA-4626 / FGSC 10389
MATLPPDGPNPNSKSAAKKEAKRLEKEAKLAAKNAKTAATVPKAKDAAAGKKAKAKDDETEFVNTTPKGQKKDVSGPMPAGYNPLAIESAWYDWWLESGFFKPQFDKDAEGNPTIKPAGLFIIPAPPPNVTGSLHIGHALTVGIQDALIRWNRMLGKTTLFAPGFDHAGISTQSVVEKRLYKLEGKTRHDLGREKFLEQVMDWKNDYQDRITKQLYRLGGSYDWNRTAFTMDPKLSKAVIETFCRLHEDGIIYRANRLVNWCVKLNTTLSNLEVDQKQLNGRTFLNVPGYDAKEKFEFGVITSFAYPIENSDEKIIVATTRPETMLGDTAIAVHPDDPRYKHLHGKLAVHPFVPGRKIPIVTDSIIVDMEFGTGAVKITPAHDPNDYDVGVRHSLECINILNDDGTLNANAGEKFKGMKRFHARVAVVKELKELGLYVDTKDNPMQIPLCSKSGDVIEPVLKPQWWVNCKPLAEEAIRRTEAGELLITPKTSENEWYRWLEGIQDWCISRQLWWGHRCPAYFVRIEGRDQDVNDGKNWVVGRTLEEATERAKVFANGAPFTLEQDEDVLDTWFSSGLWPFSIMGWPDQTADLKTFYPSSMLETGWDILFFWVARMVLLGIHLTGQMPFKEVLCHAMIRDAHGRKMSKSLGNVIDPTDVIQGLPLEALHEKLYEGNLDEKEIAKAKDGQKKDFPKGIPQCGTDALRFALCAYSGGGRDINLEILRVEGYRKFCNKIFNATKFAMLKLDESFVPQPNNKPTGKESLVEKWILHKLNVAATEINQHLTDRNFMAATTSAYNFWLYELCDVYIEAMKPMTDEAAPLETKKSAQQTLYMCLDYGLRLLHPFMPFVTEELWQRLPRMPNDSTPSIMLSSFPVADSAFEFEEADKQFDLIFSTLRAGRSLAASYNLLNNIQLFIHVRNDSEAALFEPQLATIIALTKGGKSAQVVRSSSEIPEGCGASVVTSSVTVHTLVRGLVDLDVEIGKCDKKLDVARMNHAKIVKTESQADYAKTVPENVRLANEDKRKTIEAEVATLESSREMFRRIQLQ

SEQ ID NO: 3344 - protein, 1485 aa, Agaricus bisporus
  var. bisporus
  strain H97 / ATCC MYA-4626 / FGSC 10389
MASLEDYDEFGNYIGADLDSDAEDEELNQGQYAPQPSGAPAPLEGFDDEPMQEPENEMALMEVDDEPRHKAVVLHEDKQYYPTAGELYGADVETLVQEEDAQPLSEPIVAPIKIRRWTVEEKDMPETRFDKGFLLNMTAFPEMIRNVAVVGHLHHGKTALMDMLVFETHKLIWDADKPTRYTDTHVLSREREISIKSSPMSLVLQTTSGKSHLLHLIDTPGHVNFLDEVAAAIRLADGILLVVDVVEGLMVGAEYIIRHALQENLKITLVVNKIDRLILELRIKPADAYYKIKHTIEEINTFISNIDPDPELRLSPENGNVAFASTDMNYCFTLRSFAKLYADTYGKLDVNAFAARLWGDIYFDEESRRFTRKQSDPEQNRTFIHFILNPLYKIYSNVLSEDTDALRETLASLGITLKPVIYKMDVRPLLKVVLDQFFGNSTGLVDVIVEHIPSPVENAANKVEGIYTGPQTSELAVSMKSCDPEGPVMVHITKLYHTTDAQSFRAFGRVISGTLRKGAEIKVLGEEYSPEDEEDMMKATVEDLWISEARYFIPAEEVAAGNLILIGGVDASISKTATIASTSIDDDLYIFRPMKHMTESVLKVAIEPIAPSELPKMLAGLRSINKSYPLISTKVEESGEHVMIGTGELYLDCVMHDLRRLFSEIEIKVSDPVTKFCETVLETSALKCYADTPNKKNKITMIAEPLERGIAEDIERGRVTMKMTAKDRGKFFEEKYQWDLLASRSIWAFGPYDNGPNVLLDDTLPSQVDKKLLGTIKEHIKQGFQWGAREGPLCDEPMRNVKFRLLDADIAQEAIFRGGGQIVPTARRVCYSSFLMASPKLMEPVYYVEVQAPADCISAVYTVLARRRGHVTQDIPKAGSPLYTVKALIPVIDANGFETDLRTATQGQAFCLQIFDHWSAIPGDPMDTSIKLRPLEPASGQALARDLVLKTRRRKGLGDQIAVSKYLDDEFVPTEIKAPFLEQFTEDWADRWTASEATKKNNAGSETFSYVGKWKVEEATKSIIKGDHGLVAKSPASHHAISAPFKKPIDFKQKPLVVQYEVNYQKGGSCGGGYIKLLEDGFQSSGQDFDDKTPWVVMFGPDLTCPGTKVHFIVRHKSPMTEEIEEKHYTGHPRFLVEKYTNLHTLVLHPNNTFNIYLNGELDKTGNLLEDMQPPVNPPTEIDDPSDSKPDDWVEDDRIIDIHATKPDDWDEDAPRRIPDDEAEKPEGWLDDELPHIPDPDATKPDEWDDEEDGDWVAPTMPNPKCDNAPGCGPWERPMKNNPNYKGRWSAPLIDNPDYKGPWAPRKIPNPNYFEDPTPVKSLPKIGGVGIELWTMTEDILFDNLYIGHSLEHAKKLAAETFDIKKPLERLAASVIEKLEGKDDEDDDDEVSFKDDPVSFIRNRVLSFVENVKEDPIEAFKTQPETGVALLVTLFTIFGMFSGFLGFGGASAKPVITQTAKKADTSEKKSETTSDDKKDDLKKRK

SEQ ID NO: 3345 - protein, 1590 aa, Agaricus bisporus
  var. bisporus
  strain H97 / ATCC MYA-4626 / FGSC 10389
MPEADIFKVPILGKDSIHCGFHLIPYIAHTVISTLPSSTYVLITDTNIAKFHLKSFEDVFQSTLDTHDASGAKPRFISLVIPPGETSKSRDGKAQIEDFLLLNKCTRDTVVLALGGGVIGDLVGFVSATFMRGVRFVQIPTTLLAMVDSSVGGKTAIDTPHGKNLIGAFWQPEYIFIDAAFLETLPQREFSNGMAEVVKTAAIWNENEFLSLEARSAEIFTAIQTPSENFAGRTKDTRSAAQELLLSVIVGSISVKAHIVTIDERETGLRNLVNFGHSIGHAIEAVLTPTILHGECVSIGMILEAELSRQMGILSQVGVGRLSRCLKAYNLPISVSDPRIANLPAARLLTVDRLLDIMRIDKKNSGNEKKIVILSRIGATYEQKATVVKDALIFKTLSEAAKVIPGIPSHNPVVMSTPGSKSISNRALVLAALGKGTCRLRNLLHSDDTQVMMAALGELKGAKFSWEDNGDTLVVEGGQGFLAVPPKGKELYLGNAGTAARFLTTVCTLVQASPKDNADVTIITGNARMKQRPNGPLVTALRTNGSQIKCLETEGCLPLAIAPEGLKGGTIQLAASVSSQYVSSILLCAPYAAQPVTLELTGGQVISQPYIDMTIAMMKTFGVEVKRRVDSASGKLLDTYDIPKAVYVSPPNYSIESDASSATYPLAIAAITGTSCTIDNIGTSSLQGDAKFAKEVLEKMGCTVSQTETQTTVQGPPIGGLKAIEEVDMEIMTDAFLTATVVAAVAHGKTRILGIANQRVKECNRIRAMIDQLAKFGVECIELDDGLEVIGKPIPELKRGASVHCYDDHRVAMAFSVLSTVVENTIIEEKRCVEKTWPNWWDDLENKIGIKVEGVDLAGLHAKASVSGTRNFDPSASVVLIGMRGVGKSFIGDLAANALGWPQLDADDYFAEVKKQALRDFVTEHGWPAFREAEVEVLGELLKEKATGHVISLGGGIVETPAARELIKQYASTTGPVVHVTRPLDEILAYLGAESARPAYGEPVADVYHRRHPWYTDISNYEFLNPVGASSVVTSPSAGVHEEVARFFKHITGQKPNLSSNVGAGKRSYFLSLTYPDITEALSIVEQISEGVDALELRVDLLKSSKESDAIPSTDYVASQLAALRRVTSLPIVYTVRTSSQGGKHPDKAEKEALELLELGLKAAVEYLDVEITLPEQKIRELASKKGRSQIIASYHDFSGNLKWNSVAVKEKYDIAEGLGDIIKIIGTANAIQDNFELHNFITSVNSKPNAKPIIAVNMGTQGQLSRILNETFTPVTHPLLPIKAAPGQLSFKQIQEALTLVGQLPAKQFYLFGNPISHSMSPTLHNTGFQVLGLPHKYSLLETQQFNEQNKEAIAAADFGGASVTIPFKLDVIPSLDELTPAAQAIGAVNTVIPTVSGGKRVLVGDNTDWIGIRKSIIAQLSTGVVGNGLVIGGGGTARAAIYALQSLNAETVYLWNRTKSKAEDLARAFPNARVQVLDRLGAWTSAPPNVIVGTVPASATTLEEGAPSATLLTADLYQYRDGPAVVVDMAYKPAQTPLLQLASVASNWKTVRGLDVLLEQGYEQFELWTGRRCPRKIVGEKVTEKYDA

SEQ ID NO: 3346 - protein, 180 aa, Linum usitatissimum
MADRTTQPHQVQVHTQHHYPTGGAFGRYEGVLKGGPYHQQGTGSGPSASKVLAVMTALPIGGTLLALAGITLAGTMIGLAITTPIFVICSPVLVPAALLIGFAVSAFLASGMAGLTGLTSLSWFARYLQQAGQGVGVGVPDSFDQAKRRMQDAAGYMGQKTKEVGQEIQRKSQDVKASDK

SEQ ID NO: 3347 - protein, 180 aa, Linum usitatissimum
MADRTTQPHQVQVHTQHHYPTGGAFGRYEGGLKGGPHHQQGSGSGPSASKVLAVMTALPIGGTLLALAGITLAGTMIGLAITTPIFVICSPVLVPAALLIGFAVSAFLASGMAGLTGLTSLSWFARYLQQAGQGVGVGVPDSFEQAKRRMQDAAGYMGQKTKEVGQEIQRKSQDVKASDK

SEQ ID NO: 3348 - protein, 347 aa, Linum usitatissimum
MDLIHTFLNFVAPPFTFFSLCFLLPPYFLFKTFTSAVSYVFSENVSGKVILITGASSGIGEHLAYEYGSRGACLVLVARREKGLREVVDLALELGSPQVIMIVGDVQKVDDCRRIVNETINHFGRLDHLVNNAGISSVCFFEDATDVTNFRTIMDTNFWGSAYITQFAIPYLRQTAGKIIALSSAGSWLPEPRMTIYNASKAAMVAFFETLRVELSPDIGVLIVTPGYIESELTQGKFMTAEGRMDVDQDLRDEKFGPIPVASVVSTAKGIVNSACRGDKYLTVPAWVRTTWLWKIFCPDAVELGYRLFFTSGRPGEPAPSKKMLDMTGAQGLMYPYSILNPAIKTV

SEQ ID NO: 3349 - protein, 536 aa, Linum usitatissimum
MASSALNNLVAVNPNTLSPSPKSTPLPNTFSNLRRVSAFRPIKASLFGDSPIKIPGITSQPPPSSDETTLPIRQIPGDYGLPGIGPIQDRLDYFYNQGREEFFKSRLQKYKSTVYRANMPPGPFIASNPRVIVLLDAKSFPVLFDMSKVEKKDLFTGTYMPSTELTGGYRILSYLDPSEPNHTKLKQLLFNLIKNRRDYVIPEFSSSFTDLCEVVEYDLATKGKAAFNDPAEQAAFNFLSRAFFGVKPIDTPLGKDAPSLISKWVLFNLAPILSVGLPKEVEEATLHSVRLPPLLVQNDYHRLYEFFTSAAGSVLDEAEQSGISRDEACHNILFAVCFNSWGGFKILFPSLMKWIGRAGLELHTKLAQEIRSAIQSTGGGKVTMAAMEQMPLMKSVVYETLRIEPPVALQYGKAKKDFILESHEAAYQVKEGEMLFGYQPFATKDPKIFDRPEEFVADRFVGEGVKLMEYVMWSNGPETETPSVANKQCAGKDFVVMAARLFVVELFKRYDSFDIEVGTSSLGASITLTSLKRSTF

SEQ ID NO: 3350 - protein, 375 aa, Linum usitatissimum
MERKFSPFVCDNGTGMVKAGFAGDDAPRAVFPSIVGRPRHTGVMVGMGQKDAYVGDEAQSKRGILTLKYPIEHGIVSNWDDMEKIWHHTFYNELRVAPEEHPVLLTEAPLNPKANREKMTQIMFETFNVPAMYVAIQAVLSLYASGRTTGIVLDSGDGVSHTVPIYEGYALPHAILRLDLAGRDLTDSLMKILTERGYMFTTTAEREIVRDMKEKLAYVALDYEQELETAKSSSSVEKNYELPDGQVITIGAERFRCPEVLFQPSLIGMEAAGIHETTYNSIIKCDVDIRKDLYGNIVLSGGSTMFPGIADRMSKEITALAPSSMKIKVVAPPERKYSVWIGGSILASLSTFQQMWISKSEYDESGPSIVHRKCF

SEQ ID NO: 3351 - protein, 100 aa, Linum usitatissimum
HVTHETGSMCYIEEINKAEYCDRSRYPCAQGKRYYGRGPLQLTWNYNYQEAGKANGFDGVANPDIVARDPVLAWRTALWFWMTNVRAVLPQGFGATIRAI

SEQ ID NO: 3352 - protein, 186 aa, Linum usitatissimum
KGGAKKVVISAPSKDAPMFVVGVNEKEYKPELDIVSNASCTTNCLAPLAKVINDRFGIVEGLMTTVHAITATQKTVDGPSNKDWRGGRAASFNIIPSSTGAAKAVGKVLPALNGKLTGMAFRVPTADVSVVDLTVKLEKKATYEQIKAAIKEESEGKLKGILGYVDEDCVSADFVGDNRSSIFDAK

SEQ ID NO: 3353 - protein, 158 aa, Linum usitatissimum
MSLIPSFFGNRRSDPFSALDMWDPIRDFSSFNFPSSSLILGGGENSAFVNTRIDWKETPEAHVFKADLPGLKKEEIKVEVEEDRVLQISGERNVEKEDKNDTWHRVERSSGKFMRRFRLPENAKMEEVKAAMENGVLTVTVPKAEVKKPEVKAIEISG

SEQ ID NO: 3354 - protein, 169 aa, Linum usitatissimum
MAKLMSLAAVATAFLFLIVVDASVRTTVIIDEETNQGRGGGQGGQGQQQSCEQQIQQQDFLRSCQQFMWEKVQRGGRSHYYNQGRGGGEQSQYFDSCCDDLKQLSTGCTCRGLERAIGQMRQEIQQQGQQQEVQRWIQQAKQIAKDLPGQCRTQPSQCQFQGQQQSAWF

SEQ ID NO: 3355 - protein, 168 aa, Linum usitatissimum
MAKLMSLAAVATAFLFLIVVDASVRTTVIIDEDTNQGRGGQGGQGQQQQCEKQIQEQDYLRSCQQFLWEKVQKGGRSYYYNQGRGGGQQSQHFDSCCDDLKQLRSECTCRGLERAIGQMRQDIQQQGQQQEVERWVQQAKQVARDLPGQCGTQPSRCQLQGQQQSAWF

SEQ ID NO: 3356 - protein, 475 aa, Linum usitatissimum
  MOD_RES (145)..(145): Any amino acid
  MOD_RES (228)..(228): Any amino acid
  MOD_RES (236)..(236): Any amino acid
  MOD_RES (265)..(265): Any amino acid
  MOD_RES (276)..(276): Any amino acid
  MOD_RES (362)..(362): Any amino acid
MSHQTETKASVGFKAGVKDYKLTYYTPDYETKDTDILAAFRVTPQPGVPPEEAGAAVAAESSTGTWTTVWTDGLTSLDRYKGRCYHIEPVAGEESQFIAYVAYPLDLFEEGSVTNMFTSIVGNVFGFKALRALRLEDLRIPPAYXKTFQGPPHGIQVERDKLNKYGRPLLGCTIKPKLGLSAKNYGRAVYECLRGGLBFTKDDENVNSQPFMRWRDRFLFCAEAIYKXQAETGEIXGHYLNATAGTCEEMIKRAVFARELGVPIXMHDYLTGGFTXNTSLAHYCRDNGLLLHIHRAMHAVIDRQKNHGIHFRVLAKALRMSGGDHIHSGTVVGKLEGEREITLGFVDLLRDDFVEKDRSRGXYFTQDWVSLPGVLPVASGGIHVWHMPALTEIFGDDSVLQFGGGTLGHPWGNAPGAVANRVALEACVQARNEGRDLAREGNEIIREASKWSPELAAACEVWKEIKFEYEAMDTL

SEQ ID NO: 3357 - protein, 69 aa, Linum usitatissimum
SRRCPGKNAWPELVGKSGNMAAATVERENRNVHAIVLKEGSAMTKDFRCDRVWVIVNDHGVVTSVPHIT

SEQ ID NO: 3358 - protein, 106 aa, Linum usitatissimum; identical to SEQ ID NO: 636

SEQ ID NO: 3359 - protein, 413 aa, Linum usitatissimum
MAGLAPEGSQFDAKQYDAKMSELISADGQDYFASYDEVHETFDSMGLQENLLRGIYAYGFEKPSAIQQRGIVPFCKGLDVIQQAQSGTGKTATFCSGILQQLNYGLVECQALVLAPTRELAQQIEKVMRALGDYLGVKVHACVGGTSVREDQRILSSGVHVVVGTPGRVFDMLRRQSLRADSIKMFVLDEADEMLSRGFKDQIYDIFQLLPPNIQVGVFSATMPPEALDITRKFMNKPVRILVKREELTLEGIKQFHVNVDKEEWKLETLCDLYETLAITQSVIFVNTRRKVDWLTDKMRSRDHTVSATHGDMDQNTRDIIMREFRSGSSRVLITTDLLARGIDVQQVSLVINYDLPTQPENYLHRIGRGGRFGRKGVAINFVTTDDERMLFDIQKFYNVVIEELPANVADLL

SEQ ID NO: 3360 - protein, 146 aa, Linum usitatissimum; identical to SEQ ID NO: 619

SEQ ID NO: 3361 - protein, 155 aa, Linum usitatissimum
MDQTHQTYAGTTQNPSYGGGGTMYQQQQPRSYQAVKAATAATAGGSLIVLSGLILTATVISLIIATPLLVIFSPVLVPALITVGLLITGFLASGGFGVAAVTVLSWIYRYVTGGHPAGGDSLDQARSKLAGKAREVKDRASEFAQQHVTGGQQTS

SEQ ID NO: 3362 - protein, 221 aa, Linum usitatissimum
MGRRPARCYRQIKNKPYPKSRFCRGVPDPKIRIYDVGMKKKGVDEFPFCVHLVSWEKENVSSEALEAARIACNKYMTKSAGKDAFHLRVRVHPFHVLRINKMLSCAGADRLQTGMRGAFGKPQGVCARVAIGQVLLSVRCKDSNSQHAQEALRRAKFKFPGRQKIIISRKWGFTKFNRADYVKLKQENRIMPDGVNAKLLGCHGPLANRQPGRAFAPTATA

SEQ ID NO: 3363 - protein, 826 aa, Linum usitatissimum
MPISSIATVSGGGGGDADGALRNFKLNESTFLASLMPKKEIGADRFIEAHPEYDGRGVIIAIFDSGMDPAAAGLQVTTDGKPKVLDVIDCTGSGDIDTSKVVKADADGCIGGASGASLAVNPSWKNPSGEWHNYDDKGPVIDAVVWYDGELWRAALDTQNLEDNPECGKLADFVPLTNYRIERKFGVFSTVDACTAVLNIYDEGNILSIVTDSSPHGTHVSGIATAFHQEAEGITVSPYTVRKALENTSLYVGECLADKLTTGQGLMQVDRAYEYVCQSRDIPIFQYNIKVNQSGKSSHIERRFIEVPLGASWAEATVRVSEFDTTRRFFLDTLQICPLRRPIKWESVATFSSPGAKTFSFRVVSGQTMELAVAQFWSSGLGSHDTTIVDFEISFHGIDVTKEEIILDGSDAPVRIDTEALLASEKLSPVALLNKLRVPYRPVDSKLITLTGTRDKLPSGKQTLALTLTYKFKLEDGANVKPQVPLLNNRIYDTKFESQFYMISDANKRVYSVGDVYPAASKLPKGDYTLQLYLRHDNVQYLEKLKQLVLFIEKTLEDKDVIRLNFFSEPDGPIMGNGSYKSSELVPGKKEAIYLAPPAKDKLPKAEYPQHTPLLAKILEGLHSRSKIDDKIKHSQEVIATADEVISSVDKDELAKFFSYKPDPEDEEAEKMKKKMETTRDQLAEALYSKGLALSEIESLKNSDKTETEAGAEGNIDEWTDVRKEASEESGSKQDTFEETFKELQKWVDVKSSKFGTLYVLREKRRGRLGTALKVLNDMILEDGDPPKKKLYEMKLSLLEEIGWTHLTAYEKQWMHVRFPSSLPLF

SEQ ID NO: 3364 - protein, 262 aa, Linum usitatissimum
MARGLKKHLKRLNAPKHWMLDKLGGAFAPKPSSGPHKSRECLPLVLILRNRLKYALTYREVQSILMQRHVMVDNKVRTDKTFPAGFMDVVSIPKTNENFRLLYDTKGRFRLHSIRDEEAKFKLCKVRNIQFGSKGIPYLNTYDGRTIRYPDPLIKANDTIKLDLDSTKIVDFIKFDVGNVVMVTGGRNRGRVGILKNREKHKGSIETVHIQDSTGHEFATLLSNVFTIGKGSKPWVSLPKGKGIKLTIIEEAKKRIAAQAAA

SEQ ID NO: 3365 - protein, 142 aa, Linum usitatissimum
HQTQYGGTMQNQPQYQTKSYQAVKAATAATAGGSLLVLSGLILVATIIALTMATPLLVIFSPVLVPALITVGLLITGFLASGGFGVAAITVLSWIYRYVTGRHPVGADSLDQARMRITGKAREMKDRASDFGQQHVTGQQTS

SEQ ID NO: 3366 - protein, 260 aa, Linum usitatissimum
MARPILICVASLLLFSLLATVTARIPGVYTGGPWESAHATFYGGADASGTMGGACGYGNLYSQGYGVNTAALSTALFNEGLSCGACFEIKCDSDPRWCHPGQPSIFVTATNFCPPNFAQPSDNGGWCNPPRTHFDLAMPMFLKIAEYRAGIVPVSFRRVPCRKVGGIRFSINGFRYFNLLLVTNVAGAGDIVKVSIKGERTNWMPMSRNWGQNWQSNSVLVGQRLSFRVTGSDRRTVTSMNIAPANWQFGQTFTGKNFRV

SEQ ID NO: 3367 - protein, 270 aa, Linum usitatissimum
MSSTNETSPLPGLPIDLRGKRAFVAGVADDNGYGWAIAKSLAAAGAEILLGTWVPIKTNKRYAGSSNWTVKELAESVKQDFGSIDILVHSLANGPEVVKPLLETSRNGYLAAISASSYSFISLLQNFIPIMNPGGATISLTYIASERIIPGYGGGMSSAKAALESDTRVLAFEAGRKHKIRVNTISAGPLRSRAAKAIGFIDMMIDYSSANAPLQKEVTAEEVGNAAAFLVSPLASAITGTVVYVDNGLNAMGVGVDSPLFESLNIPKAN

SEQ ID NO: 3368 - protein, 293 aa, Linum usitatissimum
MKLNPLLSNLALYDIANTPGVAADVSHINTGSEVSGYVGDEQLGKALEGSDIVIIPAGVPRKPGMTRDDLFNINAGIVKGLCQAIAKYCPHALVNMISNPVNSTVPIAAEVFKKAGTYDEKRLFGVTSLDVVRARTFYAGKANVPVAGVNIPVVGGHAGVTILPLFSQANPKANLSDEEIVALTKRTQDGGTEVVEAKAGKGSATLSMAYAGALFADACLKGLNGVPDVVECTFVQSNVTELPFFASKVRLGKNGVEEILGLGPLSDFEKQGLENMKSELKSSIEKGITFANK

SEQ ID NO: 3369 - protein, 300 aa, Linum usitatissimum
MATDAAPPRALSARELDIQMMLAAEVHLGTKNCDFQMERYVFKRRNDGIYIINLGKTWEKLQMAARVIVGIENPQDIIVQSARPYGQRAVLKFAQYTGAHAIAGRHTPGTFTNQMQTSFSEPRLLILTDPRTDHQPIKEGALGNIPTIAFCDTDSPMRYVDIGIPANNKGKNSIGCLFWLLARMVLQMRGTIPQGHKWDIMVDLFFFREPEEQKQDQDEEPDYALAAPEFYGMAAGGDWNTPAADAQWTADAVQAPISGVPAAYIAEPTAAPIAGNWEPAPVPSPAFAPPASAASGWDEV

SEQ ID NO: 3370 - protein, 80 aa, Linum usitatissimum
VGCGRIGKLLLQRLKPFGCNLLYHDRLKMEPELETQIGAKFEEDVDAMLPKCDVVVINTPLTEKTKGMFDKDRILKMKKG

SEQ ID NO: 3371 - protein, 141 aa, Linum usitatissimum
MSSVAAAGSAKSGRGKPKSKAVSRSQKAGLQFPVGRIARFLKKGRYAERVGSGSPVYLCAVMEYLAAEVLELAGNAARDNKKTRIVPRHIQLAVRNDEELSKLLGGVTIANGGVLPKIHQSLLLKKAGKDKGDIGSASQEF

SEQ ID NO: 3372 - protein, 155 aa, Linum usitatissimum
MDQSHQTYAGTMQNPSYGGGGTMHQQQQPRSYQAVKAATAATAGGSLIVLSGLILTATVISLILATPLLVIFSPVLVPALITVGLLITGFLASGGFGVAAVTVLSWIYRYVTGGHPVGADSLEQARSRLAGKAREVKDRASEFGQQHVTGGQQTS

SEQ ID NO: 3373 - protein, 166 aa, Linum usitatissimum
MASIATAEACDSNAALLASGDLRVLQPIFKIYGQSNAFSGPIVTLKLFEDNVLVREMLETRGEGRVLVVDGAGSMRCALVGGNLGQLAQNMGWAGIVVNGCIRDVDEINACDIGVRALASHPMKSSKRGLGEKHVTVQIGGTLIRDGEWLYADSDGILISKTELSV

SEQ ID NO: 3374 - protein, 206 aa, Linum usitatissimum
MNSKSLAVALLWGALLFGTLALIQAKKSDEKLKEITHKVYFDVEIDGKPAGRITMGLYGKAVPKTAENFRALCTGEKGVGKSGKPLHYKGSSFHRIIPSFMLQGGDFTHGDGRGGESIYGEKFADENFKLKHTGPGLLSMANAGKDTNGSQFFITTVTTSWLDGRHVVFGKVLSGMDVVYKVEAEGKQSGTPKSKVVIVDSGELPL

SEQ ID NO: 3375 - protein, 305 aa, Linum usitatissimum
IPPDQQRLIFAGKQLEDGRTLADYNIQKESTLHLVLRLRGGMQIFLKTLTGKTITLEVESSDTIDNVKAKIQDKEGIPPDQQRLIFAGKQLEDGRTLADYNIQKESTLHLVLRLRGGMQIFVKTLTGKTITLEVESSDTIDNVKAKIQDKEGIPPDQQRLIFAGKQLEDGRTLADYNIQKESTLHLVLRLRGGMQIFVKTLTGKTITLEVESSDTIDNVKAKIQDKEGIPPDQQRLIFAGKQLEDGRTLADYNIQKESTLHLVLRLRGGMQIFVKTLTGKTITLEVESSDTIDNVKAKIQDKEGI

SEQ ID NO: 3376 - protein, 323 aa, Linum usitatissimum
MAASTGSTAVAFKSAGFVAASSGERGINQFRHWSPVPASLHFSRAGLRCRSRSSVSSSGVRAQVAAVEPVSSESVKKVESPVVIVTGASRGIGKAIALSLGKAGCKVLVNYARSSKEAEEVSKEIEASGGQAVTFGGDVSKEEDVEAMMKTAIDAFGTVDILINNAGITRDTLLMRMKKQQWQDVIDLNLTGVFLCTQAAAKIMMKKRKGRIINIASVVGLVGNIGQANYSAAKAGVIGFTKSVAKEYSSRNINVNAVAPGFIASDMTAKLGDDIEKKILETIPLGRYGQPEEVAGLVEFLALNPAAGYMTGQVLTIDGGMVM

SEQ ID NO: 3377 - protein, 332 aa, Linum usitatissimum
MAKDPVRVLVTGAAGQIGYALVPMIARGVMLGADQPVILHMLDIPPAAEALNGVKMELVDAAFPLLKGVVATTDVVEACTGVNIAVMVGGFPRKEGMERKDVMSKNVSIYKSQASALEKHAAANCKVLVVANPANTNALILKEFAPSIPEQNITCLTRLDHNRALGQVSERLNVPVSDVKNVIIWGNHSSTQYPDVNHATVKTSSGDKPVRELVKDDVWLNAEFITTVQQRGAAIIKARKLSSALSAASSACDHIRDWVLGTPQGTWVSMGVYSDGSYNVPAGLIYSFPVTCQNGEWKIVQGLAIDEFSRKKLDLTAEELSEEKALAYSCLN

SEQ ID NO: 3378 - protein, 388 aa, Linum usitatissimum
MNVIGEPIDEKGEISTEHFLPIHREAPSFVEQATEQQILVTGIKVVDLLAPYQRGGKIGLFGGAGVGKTVLIMELINNVAKAHGGFSVFAGVGERTREGNDLYREMIESGVIKLGDKQADSKCALVYGQMNEPPGARARVGLTGLTVAEHFRDAEGQDVLLFVDNIFRFTQANSEVSALLGRIPSAVGYQPTLATDLGGLQERITTTKKGSITSVQAIYVPADDLTDPAPATTFAHLDATTVLSRQISELGIYPAVDPLDSTSRMLSPHILGEDHYGTARGVQKVLQNYKNLQDIIAILGMDELSEDDKLTVARARKIQRFLSQPFHVAEVFTGAPGKYVELKESIQSFQGVLDGKYDDLSEQSFYMVGGIDEVIAKAEKIAKESATS

SEQ ID NO: 3379 - protein, 427 aa, Linum usitatissimum
MGETRDNDYEEELLDYEEEEEKAPDSITAKVNGEAPKKGYVGIHSSGFRDFLLKPELLRAIVDSGFEHPSEVQHECIPQAILGMDVICQAKSGMGKTAVFVLSTLQQIEPTPGQVIALVLCHTRELAYQICHEFERFSTYLPDTKVAVFYGGVNIKTHRDLLKNECPHVVVGTPGRILALARDKELSLKNVRHFILDECDKMLESLDMRRDVQEIFKMTPHDKQVMMFSATLSKEIRPVCKKFMQDPMEIYVDDEAKLTLHGLVQHYIKLTELEKNRKLNDLLDALDFNQVVIFVKSVSRAAELNKLLIECNFPSICIHSGMSQEERLTRYKGFKEGHKRILVATDLVGRGIDIERVNIVINYDMPDSADTYLHRVGRAGRFGTKGLAITFVSSASDSDVLNQVQERFEVDIKELPEQIDTSTYMPS

SEQ ID NO: 3380 - protein, 508 aa, Linum usitatissimum
MGFEKKEHEFLGEIGLSSSNPGCYVGGKWKANGPVITTTNPANNQTIAEVVEGSMEDYEEGLKACSEATKTWMQVPAPKRGEIVRQIGDALRAKLDHLGRLVSLEMGKILAEGVGEVQEIIDMCDFAVGLSRQLNGSIIPSERPNHAMLEMWNPLGIVGVITAFNFPCAVLGWNACLALVCGNCVVWKGAPTTPLVTIAMTKLIAEVLEKNNLPGAIFTSLCGGAEIGQAIAKDTRIPLVSFTGSSKVGQMVQQIVSQRFGKCLLELSGNNAIIVMDDADVQLAARSVLFAAVGTAGQRCTTCRRLLLHESIYKKVLDQLVEAYKQVKIGDPLEKGTLLGPLHTTESRKNFERGIELVKSQGGNILTGGSIIKSDGNFVQPTIVEVAPTVVAVKEELFAPVLYVMKFKTLQEAIDINNSVPQGLSSSIFTQKPETIFKWIGPLGSDCGIVNVNIPTNGAEIGGAFGGEKATGGGREAGSDSWKQYMRRSTCTINYGNELPLAQGINFG

SEQ ID NO: 3381 - protein, 801 aa, Linum usitatissimum
MADSGVVTVYGNAALYEPTTKKSTFSVKVGLAQMLRGGVIMDVVNADQARIAEEAGACAVMALERVPADIRSQGGVARMSDPQLIKEIKQSVTIPVMAKARIGHFVEAQILEALGIDYIDESEVLTLADEDNHINKHNFRIPFVCGCRNLGEALRRIREGAAMIRTKGEAGTGNVIEAVRHVRSVMGDIRVLRNMDDDEVFTFAKKIAAPYDLVMQTKQLGRLPVVQFAAGGVATPADAAMMMQLGCDGVFVGSGVFKSGDPARRARAIVQAVTHYTDPEVLAEVSCGLGEAMVGINLNDPNVERIFRLTEAEPPEYIKFLFDRYSRDGTMTVEDLTRFLVEIQGEHTASHDDALAIFNSLKHLRIFQRRGLHFDAFYRYLLGDLNVANSPSNVVHHNMNAPLSHYFLFTGHNSYLTGNQLSSDSSTKPIINALKKGVRVIELDLWPNNNKDDVEMVNDTFGEILYTPESDEMSEFRSPDYLKKRILISTKPPKEYLETPGSQSSGKERTPSSSFDDKDKDEGHIPDEDEEKTAPQYRHLIAIHAAKMKGGIKNMLKVEANKVRRLSMSEQEFETASKTLATAIVRFTQRNLLRVYPKGSRLDSSNYNPFIGWMHGAQMVAFNMQGYGKHLWTMQGMFSANGGCGYLKKPDFLLELGPDDKVYDPSIPQQVKTTLKGKLYLGEGWLQDFRHTHFDLCSPPDFFVKVGIEGVPGDKAKHITKVIDDEWLPIWDEEFKFELRVPELAILRIEVMDYDVGNHGFGSQTYLPISELQTGIRSVPLYSRDGSRYKHTRLLMQFEFS

SEQ ID NO: 3382 - protein, 136 aa, Solanum tuberosum
MARTKQTARKSTGGKAPRKQLATKAARKSAPATGGVKKPHRFRPGTVALREIRKYQKSTELLIRKLPFQRLVREIAQDFKTDLRFQSSAVAALQEAAEAYLVGVFEDTNLCAIHAKRVTIMPKDIQLARRIRGERA

SEQ ID NO: 3383 - protein, 219 aa, Solanum tuberosum
MKSINILSFLLLSSTLSLVAFARSFTSENPIVLPTTCHDNLVLPEVYDQDGNPLRIGERYIIKNPLLGAGAVYLNNIGNLQCPNAVLQHMSIPQFLGKGTPVMFVRKSESDDGDVVRLMTAVYIKFFVKTTKLCVDETVWKVNDEQLVVTGGNVGNENDIFKIKKTDLVIRGMKNVYKLLHCPSHLQCKNIGSNFKNGYPRLVTVDDDKDFIPFVFIKA

SEQ ID NO: 3384 - protein, 222 aa, Solanum tuberosum
MKSINILSFLLLSSTLSLVAFARSFTSENPIVLPTTSHDDDNLVLPEVYDQDGDPLRIGERYIINNPLIGAGAVYLYNIGNLQCPNAVLQHMSIPQFLGKGTPVVFVRKSESDYGDVVRQMTAVYIKFFVKTTKLCVDQTVWKVDDEQLVVTGGKVGNENDIFKIRKIDLVTPGSSKNVYKLLHCPSHLQCKNIGGNFKNGYPRLATVDDDKDFIPFVFIKA

SEQ ID NO: 3385 - protein, 534 aa, Solanum tuberosum
MQIFVKTLTGKTITLEVESSDTIDNVKAKIQDKEGIPPDQQRLIFAGKQLEDGRTLADYNIQKESTLHLVLRLRGGMQIFVKTLTGKTITLEVESSDTIDNVKAKIQDKEGIPPDQQRLIFAGKQLEDGRTLADYNIQKESTLHLVLRLRGGMQIFVKTLTGKTITLEVESSDTIDNVKAKIQDKEGIPPDQQRLIFAGKQLEDGRTLADYNIQKESTLHLVLRLRGGMQIFVKTLTGKTITLEVESSDTIDNVKAKIQDKEGIPPDQQRLIFAGKQLEDGRTLADYNIQKESTLHLVLRLRGGMQIFVKTLTGKTITLEVESSDTIDNVKAKIQDKEGIPPDQQRLIFAGKQLEDGRTLADYNIQKESTLHLVLRLRGGMQIFVKTLTGKTITLEVESSDTIDNVKAKIQDKEGIPPDQQRLIFAGKQLEDGRTLADYNIQKESTLHLVLRLRGGMQIFVKTLTGKTITLEVESSDTIDNVKAKIQDKEGIPPDQQRLIFAGKQLEDGRTLADYNIQKESTLHLVLRLRGGNF

SEQ ID NO: 3386 - protein, 123 aa, Solanum tuberosum
MLQHMSIPQFLGEGTPVMFVRKSESDYGDVVRIMTGVYIKFFVKTTKLCVDQTGGKVGNENDIFKIRKTDLVTPGGSKNVYKLLHCPSHLQCKNIGGNFKNGYPRLVTVDDDKEFIPFVFIKA

SEQ ID NO: 3387 - protein, 218 aa, Solanum tuberosum
MKCLFLLCLCLVPIVVFSSTFTSQNLIDLPSESPLPKPVLDTNGKELNPNSSYRIISIGRGALGGDVYLGKSPNSDAPCPDGVFRYNSDVGPSGTPVRFIPLSTNIFEDQLLNIQFNIPTVKLCVSYTIWKVGNLNAYFRTMLLETGGTIGQADNSYFKIVKSSKIGYNLLSCPFTSIICLRCPEDQFCAKVGVVIQNGKRRLALVNENPLDVLFQEV

SEQ ID NO: 3388 - protein, 348 aa, Solanum tuberosum
MVTVLSIDGGGIKGIIPGIILEFLEGQLQKMDNNADARLADYFDVIGGTSTGGLLTAMITTPNENNRPFAAAKDIVPFYFQHGPHIFNSSTGQFFGPKYDGKYLMQVLQEKLGETRVHQALTEVAISSFDIKTNKPVIFTKSNLAKSPELDAKMSDICYSTAAAPTYFPPHYFATNTSNGDKYEFNLVDGAVATVADPALLSVSVATRRAEEDPAFASIRSLNYKQLLLLSLGTGTNSEFDKTHTAQETAKWGALQWMLVIQQMTEAASSYMTDYYLSTVFQDLHSQNNYLRVQENALTGTTTKADDASEANMELLVQVGENLLKKPVSKDNPETYEEALKRINRGYG

SEQ ID NO: 3389 - protein, 377 aa, Solanum tuberosum
MAEGEDIQPLVCDNGTGMVKAGFAGDDAPRAVFPSIVGRPRHTGVMVGMGQKDAYVGDEAQSKRGILTLKYPIEHGIVSNWDDMEKIWHHTFYNELRVAPEEHPVLLTEAPLNPKANREKMTQIMFETFNTPAMYVAIQAVLSLYASGRTTGIVLDSGDGVSHTVPIYEGYALPHAILRLDLAGRDLTDHLMKILTERGYSFTTTAEREIVRDVKEKLSYIALDFEQELETSKTSSSVEKSYELPDGQVITIGAERFRCPEVLFQPSLIGMEAAGIHETTYNSIMKCDVDIRKDLYGNIVLSGGTTMFPGIADRMSKELTALAPSSMKIKVVAPPERKYSVWIGGSILASLSTFQQMWIAKAEYDESGPSIVHRKCF

SEQ ID NO: 3390 - protein, 858 aa, Solanum tuberosum
MGGRELFGGHDDSKKVKGTVVMMKKNALDFTDLAGSVTDKIFEAFGQKVSFQLISSVQGDPRNGLQGKHSNPAYLENSLFTLTPLTAGSETAFGVTFDWNEEFGVPGAFIIKNTHINEFFLKSLTLEDVPNHGKVHFVCNSWVYPSFRYKSDRIFFANQPYLPSKTPELLRKYRENELLTLRGDGTGKREAWDRIYDYDIYNDLGNPDQGQENVRTTLGGSAEYPYPRRGRTGRPPTRTDPKSESRIPLILSLDIYVPRDERFGHLKMSDFLTYALKSIVQFILPELHALFDGTPNEFDSFEDVLRLYEGGIKLPQGPLFKALTAAIPLEMIKELLRTDGEGILRFPTPLVIKDSKTAWRTDEEFAREMLAGVNPIIISRLQEFPPKSKLDPEAYGNQNSTITAEHIEDKLDGLTVDEAMNNNKLFILNHHDLLIPYLRRINTTITKTYASRTLLFLQDNGSLKPLAIELSLPHPDGDQFGVTSKVYTPSDQGVESSIWQLAKAYVAVNDAGVHQLISHWLNTHAVIEPFVIATNRQLSVLHPIHKLLYPHFRDTMNINASARQILINAGGVLESTVFQSKFALEMSAVVYKDWVFPDQALPADLVKRGVAVEDSSSPHGVRLLIEDYPYAVDGLEIWSAIKSWVTDYCSFYYGSDEEILKDNELQAWWKELREVGHGDKKNEPWWPEMETPQELIDSCTTIIWIASALHAAVNFGQYPYAGYLPNRPTVSRRFMPEPGTPEYEELKKNPDKAFLKTITAQLQTLLGVSLVEILSRHTTDEIYLGQRESPEWTKDKEPLAAFDKFGKKLTDIEKQIIQRNGDNILTNRSGPINAPYTLLFPTSEGGLTGKGIPNSVSI

SEQ ID NO: 3391 - protein, 142 aa, Solanum tuberosum; identical to SEQ ID NO: 572

SEQ ID NO: 3392 - protein, 103 aa, Solanum tuberosum; identical to SEQ ID NO: 1753

SEQ ID NO: 3393 - protein, 154 aa, Solanum tuberosum
MDVHKEVNFVAYLLIVLGLLVLVSAMEHVDAKACTLECGNLGFGICPRSEGSPENRICTNCCAGYKGCNYYSANGAFICEGQSDPKKPKACPLNCDPHIAYSKCPRSEGKSLIYPTGCTTCCTGYKGCYYFGKNGKFVCEGESDEPKANMYPAM

SEQ ID NO: 3394 - protein, 232 aa, Solanum tuberosum
MQVLQEKLGETRVHQALTEVAISSFDIKTNKPVIFTKSNLANAPELDAKMYDICYSTAAAPIYFPPHYFTTHTSNGDIYEFNLVDGGVATVGDPALLSLSVATKLAQVDPKFASIKSLDYKQMLLLSLGTGTNSEFDKTYTAEEAAKWGPLRWMLAIQQMTNAASSYMTDYYISTVFQARHSQNNYLRVQENALTGTTTEMDDASEANMDLLVQVGETLLKKPVSKDSPENL

SEQ ID NO: 3395 - protein, 314 aa, Solanum tuberosum
MASLTVPAEVPSVAEDCEQLRSAFKGWGTNEKLIISILAHRNAAQRKLIRQTYAETFGEDLLKELDRELTHDFEKLVLIWTLDPSERDAYLAKEATKRWTKSNFVLVEIACTRSPKELVLAREAYHARNKKSLEEDVAYHTTGDHRKLLVPLVSSYRYGGDEVDLRLAKAESKVLHEKISDKAYSDDEVIRILATRSKAQLNATLNHYKDEYGEDILKQLEDEDEFVALLRATIKGLVYPEHYFVEVLRDAINRRGTEEDHLSRVIATRAEVDLKTIANEYQKRDSIPLGRAIAKDTGGDYENMLVALLGQEEE

SEQ ID NO: 3396 - protein, 338 aa, Solanum tuberosum
MANGKIKIGINGFGRIGRLVARVALQRDDVELVAVNDPFISTDYMTYMFKYDSVHGQWKHHELKVKDEKTLLFGEKAVTVFGIRNPEDIPWGEAGADFVVESTGVFTDKDKAAAHLKGGAKKVVISAPSKDAPMFVVGVNENEYKPELDIVSNASCTTNCLAPLAKVINDRFGIVEGLMTTVHAMTATQKTVDGPSMKDWRGGRAASFNIIPSSTGAAKAVGKVLPSLNGKLTGMAFRVPTADVSVVDLTVRLEKEASYEDIKAAIKEESEGKLKGILGYTEDDVVSTDFVGDSRSSIFDAKAGIALSKNFVKLVSWYDNEWGYSSRVIDLICHMAKA

SEQ ID NO: 3397 - protein, 414 aa, Solanum tuberosum
MNDTHPTLCIPELMRILIDLKGLNWNEAWNITQRTVAYTNHTVLPEALEKWSYELMQKLLPRHVEIIEAIDEELVHEIVLKYGSMDLNKLEEKLTTMRILENFDLPSSVAELFIKPEISVDDDTETVEVHDKVEASDKVVTNDEDDTGKKTSVKIEAAAEKDIDKKTPVSPEPAVIPPKKVRMANLCVVGGHAVNGVAEIHSEIVKEEVFNDFYELWPEKFQNKTNGVTPRRWIRFCNPPLSAIITKWTGTEDWVLKTEKLAELQKFADNEDLQNEWREAKRSNKIKVVSFLKEKTGYSVVPDAMFDIQVKRIHEYKRQLLNIFGIVYRYKKMKEMTAAERKTNFVPRVCIFGGKAFATYVQAKRIVKFITDVGATINHDPEIGDLLKVVFVPDYNVSVAELLIPASDLSEHIR

SEQ ID NO: 3398 - protein, 652 aa, Solanum tuberosum
MAGKGEGPAIGIDLGTTYSCVGVWQHDRVEIIANDQGNRTTPSYVAFTDTERLIGDAAKNQVAMNPVNTVFDAKRLIGRRFSDPSVQSDMKLWPFKVIPGPADKPMIVVTYKGEEKQFSAEEISSMVLTKMKEIAEAYLGTTIKNAVVTVPAYFNDSQRQATKDAGVISGLNVMRIINEPTAAAIAYGLDKKSTSTGEKNVLIFDLGGGTFDVSLLTIEEGIFEVKATAGDTHLGGEDFDNRMVNHFVQEFKRKHKKDISGNPRALRRLRTACERAKRTLSSTAQTTIEIDSLYEGIDFYTTITRARFEEKNMDLFRKCMEPVEKCLRDAKMDKSGVHDVVLVGGSTRIPKVQQLLQDFFNGKELCKSINPDEAVAYGAAVQAAILSGEGNEKVQDLLLLDVTPLSLGLETAGGVMTVLIPRNTTIPTKKEQVFSTYSDNQPGVLIQVYEGERARTKDNNLLGKFELSGIPPAPRGVPQINVCFDIDANGILNVSAEDKTTGQKNKITITNDKGRLSKEEIERMVQEAEKYKSEDEELKKKVEAKNGLENYAYNMRNTIKDDKVSSQLPAADKKKIEDAIDEAIKWLDSNQLAEADEFEDKMKELESVCNPIIAKMYQGGAGGATMDEDDGPSVGGGAGSGSGAGPKIEEVD

SEQ ID NO: 3399 - protein, 56 aa, Solanum tuberosum
MDDASEANMDLLVQVGETLLKKPVSKDSPETYEEALKRFAKLLSDRKKLRANKASY

SEQ ID NO: 3400 - protein, 181 aa, Solanum tuberosum
MGLTFTKLFSRLFAKKEMRILMVGLDAAGKTTILYKLKLGEIVTTIPTIGFNVETVEYKNISFTVWDVGGQDKIRPLWRHYFQNTQGLIFVVDSNDRDRVVEARDELHRMLNEDELRDAVLLVFANKQDLPNAMNAAEITDKLGLHSLRQRHWYIQSTCATSGEGLYEGLDWLSNNIANKA

SEQ ID NO: 3401 - protein, 447 aa, Solanum tuberosum
MGKEKVHINIVVIGHVDSGKSTTTGHLIYKLGGIDKRVIERFEKEAAEMNKRSFKYAWVLDKLKAERERGITIDIALWKFETTKYYCTVIDAPGHRDFIKNMITGTSQADCAVLIIDSTTGGFEAGISKDGQTREHALLAFTLGVRQMICCCNKMDATTPKYSKARYDEIVKEVSSYLKKVGYNPDKIPFVPISGFEGDNMIERSTNLDWYKGPTLLEALDQLNEPKRPSDKPLRLPLQDVYKIGGIGTVPVGRVETGVIKPGMVVTFGPTGLTTEVKSVEMHHEALQEALPGDNVGFNVKNVAVKDLKRGFVASNSKDDPAKGAASFTAQVIIMNHPGQIGNGYAPVLDCHTSHIAVKFAEILTKIDRRSGKELEKEPKFLKNGDAGMVKMIPTKPMVVETFSEYPPLGRFAVRDMRQTVAVGVIKSVDKKDPSGAKVTKAAQKKK

SEQ ID NO: 3402 - protein, 78 aa, Solanum tuberosum; identical to SEQ ID NO: 595

SEQ ID NO: 3403 - protein, 150 aa, Solanum tuberosum
MSKRKTREPKEETVTLGPATREGELVFGVAHIFASFNDTFIHVTDLSGRETMVRITGGMKVKADRDESSPYAAMLAAQDVSQRCKELGINALHIKLRATGGNKTKTPGPGAQSALRALARSGMKIGRIEDVTPIPTDSTRRKGGRRGRRL

SEQ ID NO: 3404 - protein, 203 aa, Solanum tuberosum
MKQAYYLSMEFLQGRALLNAIGNLELTGAFAEALKNLGHNLENVASQEPDAALGNGGLGRLASCFLDSLATLNYPAWGYGLRYKYGLFKQRITKDGQEEVAEDWLEIGSPWEVVRNDVSYPIKFYGKVSTGSDGKRYWIGGEDIKAVAYDVPIPGYKTRTTISLRLWSTQVPSADFDLSAFNAGEHTKACEAQANAEKVYLIY

SEQ ID NO: 3405 - protein, 142 aa, Solanum tuberosum; identical to SEQ ID NO: 621

SEQ ID NO: 3406 - protein, 205 aa, Solanum tuberosum; identical to SEQ ID NO: 566

SEQ ID NO: 3407 - protein, 490 aa, Solanum tuberosum
MTISPRYDQYKDAWDTSVAVEVKVGDSIEIVRFFHCYKRGVDRVFVDHPMFLEKVWGKTGSKIYGPKAGLDYLDNELRFSLLCQAALEAPKVLNLNSSNYFSGPYGEDVLFIANDWHTALIPCYLKSMYQSRGIYLNAKVAFCIHNIAYQGRFSFSDFPLLNLPDEFRGSFDFIDGYEKPVKGRKINWMKAGILESHRVVTVSPYYAQELVSAVDKGVELDSVLRKTCITGIVNGMDTQEWNPATDKYTDVKYDITTVMDAKPLLKEALQAAVGLPVDKKIPLIGFIGRLEEQKGSDILVAAIHKFIGLDVQIVVLGTGKKEFEQEIEQLEVLYPNKAKGVAKFNVPLAHMITAGADFMLVPSRFEPCGLIQLHAMRYGTVPICASTGGLVDTVKEGYTGFHMGAFNVECDVVDPADVLKIVTTVARALAVYGTLAFAEMIKNCMSEELSWKEPAKKWETLLLGLGASGSEPGVEGEEIAPLAKENVATP

SEQ ID NO: 3408 - protein, 492 aa, Solanum tuberosum
MDPSKYRPSSAYDTPFLTTNAGGPVYNNVSSLTVGPRGPVLLEDYYLIEKLATFDREKIPERVVHARGASAKGFFEVTHDISHLSCADFLRAPGAQTPVICRFSTVVHERGSPESIRDIRGFAVKFYTREGNFDLVGNNVPVFFNRDAKSFPDTIRALKPNPKSHIQENWRILDFFSFLPESLHTFAFFYDDVCLPTDYRHMEGFGVHAYQLINKEGKAHYVKFHWKPTCGVKCMSEEEAIRVGGTNHSHATKDLYDSIAAGNYPEWKLFIQTMDPEDVDKFDFDPLDVTKTWPEDLLPLIPVGRLVLNRNIDNFFAENEQLAFNPGHIVPGIYYSEDKLLQTRIFAYADTQRHRIGPNYMQLPVNAPKCGHHNNHRDGAMNMTHRDEEVDYLPSRFDPCRPAEQYPIPACVLNGRRTNCVIPKENNFKQAGERYRSWESDRQDRYITKWVESLSDPRVTHEIRSIWISYLSQADKSCGQKVASRLTVKPTM

SEQ ID NO: 3409 - protein, 765 aa, Solanum tuberosum
MASHVVGYPRMGPKRELKFALESFWDGKSSAEDLKKVSADLRSSIWKQMSDAGIKYIPSNTFSYYDQVLDTTTMLGAVPSRYNWTGGEIEFGTYFSMARGNASVPAMEMTKWFDTNYHFIVPELGPDVNFSYASHKAVNEYKEAKAQGVDTVPVLVGPVSYLLLSKPAKGVDKSFPLLSLLDKILPIYKEVIAELKAAGASWIQLDEPTLVLDLESHKLEAFTKAYADLESSLSGLNVLVETYFADVPAGAFKTLTALKGVTAFGFDLVRGTQTLELIKSSFPSGKYLFAGVVDGRNIWASDLAASLALLQSLEGVVGKDKLVTSTSCSLLHTAVDLINETKLDDEIKSWLAFAAQKVVEVNALAKALSGAKDEAFFSANAAAQASRKSSPRVTNEAVRKASAALQGSDHRRATNVSARLDAQQKKLNLPILPTTTIGSFPQTVELRRVRREYKAKKISEEEYVKAITEEIKKVVDLQEELDIDVLVHGEPERNDMVEYFGEQLSGFAFTANGWVQSYGSRCVKPPIIYGDVSRPKAMTVFWSSKAQEMTKRPMKGMLTGPVTILNWSFVRNDQPRFETCYQIALAIKDEVEDLEKAGITVIQIDEAALREGLPLRKAEHTSYLNWAVHSFRITNVGIQDTTQIHTHMCYSNFNDIIHSIIDMDADVITIENSRSDEKLLSVFREGVKYGAGIGPGVYDIHSPRIPSTEEIADRVNKMLAVLETNILWVNPDCGLKTRKYTEVKPALQNMVSAAKTIRTQLASAK

SEQ ID NO: 3410 - protein, 140 aa, Solanum tuberosum
MSKRGRGGSAGNKFRMSLGLPVAATVNCADNTGAKNLYIISVKGIKGRLNRLPSACVGDMVMATVKKGKPELRKKVMPAVIVRQRKPWRRKDGVFMYFEDNAGVIVNPKGEMKGSAITGPIGKECADLWPRIASAANAIV

SEQ ID NO: 3411 - protein, 227 aa, Solanum tuberosum
MKSINILSFLLLSSTLSLVAFAQSFTSENPIVLPTTSHDDDNLVLPEVYDDEGHPLRIGEEYIINNPLLGAGAVYLDNIGNLTCPNAVLQHISTFNLSGDGTPVKFVRKSESDDGDVVRVMTVVYIKFFPNIPNLLCVNENVWKVNDEELVVTGGNVGNENDIFKIMKTDLVTPEGSKYVYKLLHCPAHLECKNIGVNFKDGYPRLTTVDDDKNFAPFVFSKAKNAN

SEQ ID NO: 3412 - protein, 381 aa, Solanum tuberosum
MAMSRVASTAARAITSPSSLVFTRELQASPGPKKIVGVFYKANEYAEMNPNFLGCAENALGIREWLESKGHQYIVTPDKEGPDCELEKHIPDLHVLISTPFHPAYVTAERIKKAKNLQLLLTAGIGSDHVDLKAAAAAGLTVAEVTGSNTVSVAEDELMRILILVRNFLPGHHQVINGEWNVAAIAHRAYDLEGKTVGTVGAGRIGRLLLQRLKPFNCNLLYHDRLKMDSELENQIGAKFEEDLDKMLSKCDIVVINTPLTEKTKGMFDKERIAKLKKGVLIVNNARGAIMETQAVVDACNSGHIAGYSGDVWYPQPAPKDHPWRYMPNQAMTPHISGTTIDAQLRYAAGTKDMLDRYFKGEDFPAENYIVKDGELAPQYR

SEQ ID NO: 3413 - protein, 444 aa, Solanum tuberosum
MATIKSIKARQIFDSRGNPTVEVDVHVSNGVFARAAVPSGASTGIYEALELRDGGSDYLGKGVSKAVNNVNSIIGPALIGKDPTDQTGLDNFMVHELDGTQNEWGWCKEKLGANAILAVSLAVCKAGAAVRNVPLYKHIADLAGNKKLVLPVPAFNVINGGSHAGNKLAMQEFMILPVGAANFKEAMKMGCEVYHHLKSVIKKKYGQDATNVGDEGGFAPNIQENKEGLELLKTAIEKAGYTGKVVIGMDVAASEFYGKDKSYDLNFKEESNDGSQKISGDQLKDLYKSFVSEYPIVSIEDPFDQDDWETYAKLTTEIGEQVQIVGDDLLVTNPKRVAKAIAEKTCNALLLKVNQIGSVTESIEAVKMSKKAGWGVMTSHRSGETEDTFIADLAVGLSTGQIKTGAPCRSERLAKYNQLLRIEEELGSEAVYAGASFRKPVEPY

SEQ ID NO: 3414 - protein, 579 aa, Solanum tuberosum
MESALKDLSTPTGGVEDVYGEDCATEDQCITPWTIAVSSGYNLLRDPRYNKGLAFTERERDAHYLRGLLPPVISSQELQEKKLMQSIRQYDVPLHKYVAMMELEERNERLFYKLLIDNVEELLPIVYTPTVGEACQKYGSIFKRPQGLYISLNEKGRILEVLKNWPEKSIQVIVVTDGERILGLGDLGCQGMGIPVGKLALYTALGGVRPSACLPITIDVGTNNEKLLNDEFYIGLKQRRATGQEYYDFLHEFMSAVKQNYGEKILVQFEDFANHNAFELLAKYRTSHLVFNDDIQGTASVVLAGLIASLKLLGGALCDHTFLFLGAGEAGTGIAELIALEISNKTKIPVEETRKKIWLVDSKGLIVSGRKETLQAFKKPWAHEHEPVNNLLDAVKAVKPTVLIGTSGTGRTFTKEVVEAMACMNKRPLIMALSNPTSQAECTAEEAYTWSEGRVVFASGSPFPSFEYDGKLNIPGQANNCYIFPGFGFGLVMSGTIRVHDDMLLAASEALAAQVTEEHYAKGMIYPPFADIRKISAHIAASVAAKAYELGVATRLPQPADLVKYAESCMYTPNYRSYR

SEQ ID NO: 3415 - protein, 761 aa, Solanum tuberosum
MGLMSEALTQILIPLAAFIGIGFALLQWFLVSKVRVSSGSNLVSEYNDKLIEEDEQEEGIDSDDVVAKCADIQKAISEGATSFLFTEYKYLGIFMVVFGAIIFLFLGSVKSFSTESEPCTFNKEKICKPALANAFFTTIAFFLGGLTSALSGFLGMKIATYANARTTLEARKSIGKAFIIAFRSGAVMGFLLAANGLLVLYISINLFKLYYGDDWEGLYESITGYGLGGSSMALFGRVGGGIYTKAADVGADLVGKVERNIPEDDPRNPAVIADNVGDNVGDIAGMGSDLFGSYAESSCAALFVASISSFGSSHDYSAMSYPLIISSMGIVVCLITTLFATDMFEIKNVTEIEPSLKRQLLISTVLMTVGIAFVSFFALPSEFTIFDFGSEKVVKNWHLFFCVSIGLWAGLVIGYTTEYYTSSAYSPVQEVADSCKTGAATNVIFGLALGYKSVIIPIFAIAASIYVSFSLAAMYGIAVAALGMLSTIATGLAIDAYGPISDNAGGIAEMAGMSHSIRERTDALDAAGNTTAAIGKGFAIGSAALVSLALFGAYVSRAGIKTVDVLSPKVFIGLLVGAMLPYWFSAMTMKSVGSAALKMVEEVRRQFNSIPGLMEGTAKPDYATCVKISTDASLKEMIPPGALVMLTPLIAGTFFGVETLAGVLAGSLVSGVQVAISASNTGGAWDNAKKYIEAGATEHARSLGPKGSDAHKAAVIGDTVGDPLKDTSGPSLNILIKLMAVESLVFAPFFATHGGLLFKLL

SEQ ID NO: 3416 - protein, 92 aa, Gossypium barbadense
MARSLKKNPFVANHLLKKIERLNTKAEKEIIITWSRASTIIPTMIGHTIAIHNGKEHLPIYITDRMVGHKLGEFAPTINFRGHAKNDNKSRR

SEQ ID NO: 3417 - protein, 92 aa, Bifidobacterium adolescentis
  strain ATCC 15703 / DSM 20083 / NCTC 11814 / E194a
MTRSIKKGPFVDAHLQKKVDEQNEKGTHNVIKTWSRRSMITPDFIGHTFAVHDGRKHVPVFVTESMVGHKLGEFAPTKTFKGHVKDDKKARR

SEQ ID NO: 3418 - protein, 72 aa, Bifidobacterium adolescentis
  strain ATCC 15703 / DSM 20083 / NCTC 11814 / E194a
MAKDGVIEVEGQVVEALPNAMFRVELENKHIVLATISGKMRKNYIRILPQDRVVLEMSPYDLNRGRITYRYK

SEQ ID NO: 3419 - protein, 62 aa, Oryza sativa
  subsp. indica
MSDKCGNCDCADKSQCVKKGTSYGVVIVEAEKSHFEEVAAGEENGGCKCGTSCSCTDCKCGK

SEQ ID NO: 3420 - protein, 244 aa, Oryza sativa
  subsp. indica
MDRYGEKQQQQQMFASYVDASLLAASGEVQGERPRARRRRRRGARCVGGGGGGGEVDGGDPKKRRLSDEQVEMLELSFREERKLETGRKVHLASELGLDPKQVAVWFQNRRARHKSKLLEEEFSKLKHAHDAAILHKCHLENEVLRLKERLVVAEEEVRRLRSAAGSHTASGEGGDIMGLGGSGACVAGSPSSSFSTGTCQPPSFGGGGGGGDHLGDDDLVYVPEYGGYADNSVVEWFSLYGLI

SEQ ID NO: 3421 - protein, 119 aa, Phaseolus vulgaris
MTRIKRGYIARKRRTKIRLFVSSFRGAHSRLTRTITQQKMKALVSAHRDRDRKKRDFRGLWISRINAVIRGNPKVSYIYSNLIHSLYTRQLLLNRKIVAQIAILKENCLFMIANNIIKT

SEQ ID NO: 3422 - protein, 92 aa, Populus trichocarpa
MTRSLKKNPFVANHLLRKINKLNTKAEKNLIVTWSRASTIIPTMIGHTIAIHNGKEHLPIYITDRMVGHKLGEFAPTLNFRGHAKNDNKSRR

SEQ ID NO: 3423 - protein, 567 aa, Sus scrofa
MHGRLKVKTSEEQAEAKRLEREQKLKLYQTATQTVFQKRQAGELDESVLELTSQILGANPDFATLWNCRREVLQRLEVQKSPEELAALVKAELGFLESCLRVNPKSYGTWHHRCWLLGRLPEPNWARELELCARFLEVDERNFHCWDYRRFVASQAAVPPAEELAFTDSLITRNFSNYSSWHYRSCLLPQLHPQPDSGPQGRLPEDVLLKELELVQNAFFTDPNDQSAWFYHRWLLGRADPQDALRCLHVSRDEACLTVSFSRPLLVGPSTETLLLMVNESPLSVEWRTPDGRNRPSHVWLCDLPAASLNDHLPQHTFRVIWTAGNAQKECVLLKGRQEGWCRDSATDEQLFRCELSVEKSTVLQSELESCKELQELEPENKWCLLTIILLMRALDPLLYEKETLQYFQTLKAVDPMRAAYLDDLRSKFLLENSVLKMEYADVRVLHLGHKDLTVLCHLEQLLLVTHLDLSHNRLRALPPALAALRCLEVLQANDNAIESLDGVTNLPRLQELSLCNNRLQQPAVLQPLASCPRLVLLNLQDNPLCQAVGISEHLAELLPSVSSILT

SEQ ID NO: 3424 - protein, 108 aa, Sus scrofa
MTAHILLLWLFASSILGDPDSAGRLTRHQVSLKSGRLCSLGTCQTHRLPEIIYWLRSASTKELSGKAGRKPQDPYSYGRRRRRRRRRREARLLRRLQDPSLRRAQLAG

SEQ ID NO: 3425 - protein, 185 aa, Lactobacillus reuteri
  strain DSM 20016
MDLKVFDGQDKSELSMIEVAHAILAHHGKAMAFVDLTNEVQQYLGKSDEEIRERLAQFYTDLNVDGSFISLGDNTWGLRAWYPFESIDEATVGENEEDEEDDRPKKKRRKVNAFLADTDDDDDVIDYDNDDPEDEDLDTDDDADSEDDYDDDTDDFSDDDDDLDDGIEGQLSELHDEEDEDEDDE

SEQ ID NO: 3426 - protein, 158 aa, Lactobacillus reuteri
  strain DSM 20016
MAKVESFTLDHTKVKAPYVRLITVEEGPKGDKISNYDLRLVQPNENAIPTAGLHTIEHLLAGLLRDRLGGVIDCSPFGCRTGFHLITWGEHSTTEVAKALKSSLEEIAYKTKWEDVQGTTIESCGNYRDHSLFSAKEWSKKILDEGISDKPFERHVVD

SEQ ID NO: 3427 - protein, 344 aa, Bubalus bubalis
MARPRHQPGGLCLLLLLLCQFMEDRSAQAGNCWLRQAKNGRCQVLYKTELSKEECCSTGRLSTSWTEEDVNDNTLFKWMIFNGGAPNCIPCKETCENVDCGPGKKCRMNKKNKPRCVCAPDCSNITWKGLVCGLDGKTYRNECALLKARCKEQPELQVQYQGKCKKTCRDVFCPGSSTCVVDQTNNAYCVTCNRICPEPTSSEQYLCGNDGVTYPSACHLRKATCLLGRSIGLAYEGKCIKAKSCDDIQCTGGKKCLWDFKVGRGRCSLCGELCPESKSEEPVCASDNATYASECAMKEAACSSGVLLEVKHSGSCNSISEDTEDEEEDEDQDYSFPISSILEW

SEQ ID NO: 3428 - protein, 582 aa, Bos taurus
MSSSLGKEKDSKEKDPKAPSAKEREKEAKASGGFGKESKEKEPKTKGKDAKDGKKDSSAAQPGVAFSVDNTIKRPNPAPGTRKKSSNAEVIKELNKCREENSMRLDLSKRSIHILPSSIKELTQLTELYLYSNKLQSLPAEVGCLVNLMTLALSENSLTSLPDSLDNLKKLRMLDLRHNKLREIPSVVYRLDSLTTLYLRFNRITTVEKDIKNLSKLSMLSIRENKIKQLPAEIGELCNLITLDVAHNQLEHLPKEIGNCTQITNLDLQHNELLDLPDTIGNLSSLSRLGLRYNRLSAIPRSLAKCSALEELNLENNNISTLPESLLSSLVKLNSLTLARNCFQLYPVGGPSQFSTIYSLNMEHNRINKIPFGIFSRAKVLSKLNMKDNQLTSLPLDFGTWTSMVELNLATNQLTKIPEDVSGLVSLEVLILSNNLLKKLPHGLGNLRKLRELDLEENKLESLPNEIAYLKDLQKLVLTNNQLTTLPRGIGHLTNLTHLGLGENLLTHLPEEIGTLENLEELYLNDNPNLHSLPFELALCSKLSIMSIENCPLSHLPPQIVAGGPSFIIQFLKMQGPYRAMV

SEQ ID NO: 3429 - protein, 131 aa, Bos taurus
MPPKGKSGSGKGGKGKAASGSESSEKKAQGPKGGGNAVKVRHILCEKHGKILEAMEKLKSGMKFNEVAAQYSEDKARQGGDLGWMTRGSMVGPFQEAAFALPISVLDKPVFTDPPVKTKFGYHIIMVEGRK

SEQ ID NO: 3430 - protein, 69 aa, Saccharomyces cerevisiae
  strain YJM789
MTVKICDCEGECCKDSCHCGSTCLPSCSGGEKCKCDHSTGSPQCKSCGEKCKCETTCTCEKSKCNCEKC

SEQ ID NO: 3431 - protein, 271 aa, Saccharomyces cerevisiae
  strain YJM789
MGLAATRTKQRFGLDPRNTAWSNDTSRFGHQFLEKFGWKPGMGLGLYPMNSNTSHIKVSIKDDNVGLGAKLKRKDKKDEFDNGECAGLDVFQRILGRLNGKESKISEELDTQRKQKIIDGKWGIHFVKGEVLASTWDPKTHKLRNYSNAKKRKREGDDSEDEDDDDKEDKDSDKKKHKKHKKHKKDKKKDKKDKKEHKKHKKEEKRLKKEKRAEKTKETKKTSKLKSSESASNIPDAVNTRLSVRSKWIKQKRAALMDSKALNEIFMITND

SEQ ID NO: 3432 - protein, 93 aa, Ipomoea purpurea
MARSLKKNPFVANHLLKKIDKLNRKAEKEIIRTWSRGSTIIPTMIGHTIAIHNGKEHLPIYITDHMVGHKLGEFASTFNFRGHTKSDNKSRRR

SEQ ID NO: 3433 - protein, 166 aa, Bos taurus
MSAPPPLQIREANAHLAAVHRRAAELEARLEAAECMVRAQAERLARHDQQLSAALDELGRAKDREIAALREQLLTSEAAVQSLQAAVRQRDKLIGQLQPRAELLQDLCRRRPPLAGLLATLAEAERLGPLPASDLLPGGPSSPLANSTGEEEGSDQLEPAVFGTTV

SEQ ID NO: 3434 - protein, 117 aa, Carica papaya
MTRIKRGYIARRRRTKIRLFASSFRGAHSRLTRTITQQRIRALVSAHRDRGRKKRDFRRLWITRINAVIRGDGVSYSYNRFIHNLYKKQLLLNRKILAQIAISNRSCLYTISNEIRK

SEQ ID NO: 3435 - protein, 37 aa, Carica papaya
MKIRASVRKICEKCRLIRRRGRIIVICSNPRHKQRQG

SEQ ID NO: 3436 - protein, 131 aa, Lactobacillus reuteri
  strain JCM 1112
MKKTGIINSEVSAVVANMGHMDWLSIGDAGMPVPFGTKKIDLAVDKELPSFMDVLNNVLKEMKVQKIYLAEEIKDQNPAQLENIKKALPDVEVAFMPHSELKKSLTKTHAFIRTGEMTPYSNIILESGVTF

SEQ ID NO: 3437 - protein, 73 aa, Lactobacillus reuteri
  strain JCM 1112
MRMSFYQFLMTQRNPNSADEVQQFANNAFFDTTFPKHSEDFDEISHYLEENADYLPSMTIFDEAWQRYIDAMN

SEQ ID NO: 3438 - protein, 106 aa, Lactobacillus casei
  strain BL23
MANNEHVTPGEDDQQITLIDEKGNEELYQVLFTFDSEDYGKSYVLLYPASESDDQEVEIQAFSFTPDENGDASSGDLFPIEDDAEWDMVEEVLNTFLADDDSNLKD

SEQ ID NO: 3439 - protein, 333 aa, Salmo salar
MNDTLALLQKFNAHPDSRCWYVAWNPKGTLLASCGGDRTIRIWGREGDSWECKTVLQDGHQRTVRKVAWSPCGNYLASASFDATTCIWKKKNDDFECLTVLEGHENEVKCVAWAPSGNLLATCSRDKSVWIWEVDEENEYECVSVVNSHTQDVKHVVWHPTQELLASCSYDNNVCVYKEEDDDWECRATLEGHTSTVWGLTFDPSGQRLASCSDDCTVKIWKECQPEGGQEGTDAAWKCVCTLSGFHGRTVYDIAWCPLTGALATACGDDGVRVFKEDETADPDQPAFSLSAHVPKAHTQDVNCIAWHPKEAGLLVSCSDNGEIAVWNYQSGV

SEQ ID NO: 3440 - protein, 330 aa, Salmo salar
MKDTLALLQKFNAHPDSRCWYVAWNPKGTLLASCGGDRAIRIWGREGDSWECKTVLQDGHQRAVRKVAWSPCGNYLASASFDATTCIWKKKNDDFECLTVLEGHENEVKCVAWAPSGNQLATCSRDKSVWIWEVDEEDEYECVSVVNSHTQDVKHVVWHPTQELLASCSYDNNVCVYKEEDDDWECRATLEGHTSTVWGLTFDPSGQRLASCSDDRTVKIWKECQPGGGQDTAWKCVCTLSGFHGRTVYDIAWCPLTGALATACGDDGVRVFKEDETADPDQPVFSLSAHVPKAHSQDVNCIAWHPKEAGLLVSCSDNGEIAVWNYQSEV

SEQ ID NO: 3441 - protein, 61 aa, Bifidobacterium longum
  subsp. infantis
  strain ATCC 15697 / DSM 20088 / JCM 1222 / NCTC 11817 / S12
MAKNLKITLHHGIVNRTPAQRATVKTLGLNKIGKTVVREDTPANRGLVNAVRHLVTVEEVD

SEQ ID NO: 3442 - protein, 92 aa, Bifidobacterium longum
  subsp. infantis
  strain ATCC 15697 / DSM 20088 / JCM 1222 / NCTC 11817 / S12
MTRSIKKGPFVDAHLQKKVDEQNEKGTKNVIKTWSRRSMITPDFIGHTFAVHDGRKHVPVFVTEAMVGHKLGEFAPTKTFKGHVKDDKKARR

SEQ ID NO: 3443 - protein, 92 aa, Bifidobacterium animalis
  subsp. lactis
  strain AD011
MTRSIKKGPFVDAHLQKKVDEQNAKGTHNVIKTWSRRSMITPDFIGHTFAVHDGRKHVPVFVTESMVGHKLGEFAPTRTFKGHVKDDKKSRR

SEQ ID NO: 3444 - protein, 563 aa, Bos taurus; identical to SEQ ID NO: 751

SEQ ID NO: 3445 - protein, 360 aa, Saccharomyces cerevisiae; identical to SEQ ID NO: 734
  strain FostersB

SEQ ID NO: 3446 - protein, 446 aa, Bos taurus; identical to SEQ ID NO: 750

SEQ ID NO: 3447 - protein, 559 aa, Bos taurus; identical to SEQ ID NO: 761

SEQ ID NO: 3448 - protein, 441 aa, Sus scrofa; identical to SEQ ID NO: 731

SEQ ID NO: 3449 - protein, 591 aa, Meleagris gallopavo; identical to SEQ ID NO: 781

SEQ ID NO: 3450 - protein, 616 aa, Bos taurus; identical to SEQ ID NO: 776

SEQ ID NO: 3451 - protein, 264 aa, Sus scrofa; identical to SEQ ID NO: 746

SEQ ID NO: 3452 - protein, 132 aa, Oryza sativa
  subsp. japonica
MVVLQPDPFLSELTSMYERSTEKGSVWVTMKRSSMKCQARLKKMAAKGEAVEYRCLVRATDGKKNICTALSAKEYLKFQASYATVLKAHMHALKKRERKDKKKAAEVEKIPEKAPKKQKKAPSSKKSAGSKS

SEQ ID NO: 3453 - protein, 172 aa, Gallus gallus
MSSNECFKCGRTGHWARECPTGIGRGRGMRSRGRAGFQFMSSSLPDICYRCGESGHLAKDCDLQEDKACYNCGRGGHIAKDCKEPKREREQCCYNCGKPGHLARDCDHADEQKCYSCGEFGHIQKDCTKVKCYRCGETGHVAINCSKTSEVNCYRCGESGHLARECTIEATA

SEQ ID NO: 3454 - protein, 344 aa, Equus caballus
MVRPRHQPGGLCLLLLLLCQFMEDRSAQAGNCWLRQAKNGRCQVLYKTELSKEECCSTGRLSTSWTEEDVNDNTLFKWMIFNGGAPNCIPCKETCDNVDCGPGKKCRMNKKNKPRCVCAPDCSNITWKGPVCGLDGKTYRNECALLKARCKEQPELEVQYQGKCKKTCRDVNCPGSSTCVVDQTNNAYCVTCNRICPEPTSSEQYLCGNDGVTYSSACHLRKATCLLGRSIGLAYEGKCIKAKSCEDIQCTGGKKCLWDFKVGRGRCSLCDELCPDSKSEEPVCASDNATYASECAMKEAACSSGVLLEVKHSGSCNSISEDTEEEEEDEDQDYSFPISSILEW

SEQ ID NO: 3455 - protein, 147 aa, Saccharomyces cerevisiae
  strain ATCC 204508 / S288c
MGMLELVGEYWEQLKITVVPVVAAAEDDDNEQHEEKAAEGEEKEEENGDEDEDEDEDEDDDDDDDEDEEEEEEVTDQLEDLREHFKNTEEGKALVHHYEECAERVKIQQQQPGYADLEHKEDCVEEFFHLQHYLDTATAPRLFDKLK

SEQ ID NO: 3456 - protein, 90 aa, Bos taurus [sequence omitted]

SEQ ID NO: 3457 - protein, 90 aa, Gallus gallus
MPKRKAEGDTKGDKAKVKDEPQRRSARLSAKPAPPKPEPKPKKAAPKKSEKVPKGKKGKADAGKEGNNPAENGDAKTDQAQKAEGAGDAK

SEQ ID NO: 3458 - protein, 169 aa, Bos taurus
AAQKRPSQRSKYLASASTMDHARHGFLPRHRDTGILDSLGRFFGSDRGAPKRGSGKDGHHAARTTHYGSLPQKAQGHRPQDENPVVHFFKNIVTPRTPPPSQGKGRGLSLSRFSWGAEGQKPGFGYGGRASDYKSAHKGLKGHDAQGTLSKIFKLGGRDSRSGSPMARR

SEQ ID NO: 3459 - protein, 50 aa, Sus scrofa
MARYRCCRSHSRSRCRPRRRRCRRRRRRCCPRRRRAVCCRRYTVIRCRRC

SEQ ID NO: 3460 - protein, 155 aa, Bos taurus
MYKIQLLSCIALTLALVANGAPTSSSTGNTMKEVKSLLLDLQLLLEKVKNPENLKLSRMHTFDFYVPKVNATELKHLKCLLEELKLLEEVLNLAPSKNLNPREIKDSMDNIKRIVLELQGSETRFTCEYDDATVNAVEFLNKWITFCQSIYSTMT

SEQ ID NO: 3461 - protein, 176 aa, Saccharomyces cerevisiae
  strain ATCC 204508 / S288c
MTAQQAPKWYPSEDVAAPKKTRKAVRPQKLRASLVPGTVLILLAGRFRGKRVVYLKHLEDNTLLVTGPFKVNGVPLRRVNARYVIATSTKVSVEGVNVEKFNVEYFAKEKLTKKEKKEANLFPEQQTKEIKTERVEDQKVVDKALLAEIKKTPLLKQYLSASFSLKNGDKPHLLKF

SEQ ID NO: 3462 - protein, 87 aa, Bos taurus
MSQAEFDKAAEEVKHLKTKPADEEMLFIYSHYKQATVGDINTERPGMLDFKGKAKWDAWNELKGTSKEDAMKAYIDKVEELKKKYGI

SEQ ID NO: 3463 - protein, 116 aa, Triticum aestivum
MSYISGARSLPDEQVRIASTKMDGIGPKKAIQLRYRLGISGNIKMNELTKYQIDQIEQMIAQDHVVHWELKRGERADIERLISISRYRGIRHQDGSPLRGQRTHTNARTARKQIRK

SEQ ID NO: 3464 - protein, 102 aa, Zea mays
MQMVQLQIRVKMIWLLFMNHNHNHNHNQNHNHSHNLNPKKKHHRRGQRSAHRMYGSISPRRKLKWRSMERNTFRYGDIATFLIARLSIGLRVIMEQADFEIT

SEQ ID NO: 3465 - protein, 85 aa, Saccharomyces cerevisiae
  strain ATCC 204508 / S288c
MAEKQRQLKLQKIYKQKYIGLGDESTTREQWQRNVRNDTLNTLQGHSASLEYVSLSRGDLSIRDTRIHLLKSMSPGYKAYLREER

SEQ ID NO: 3466 - protein, 108 aa, Saccharomyces cerevisiae
  strain ATCC 204508 / S288c
MPPKQQLSKAAKAAAALAGGKKSKKKWSKKSMKDRAQHAVILDQEKYDRILKEVPTYRYVSVSVLVDRLKIGGSLARIALRHLEKEGIIKPISKHSKQAIYTRAAASE

SEQ ID NO: 3467 - protein, 59 aa, Oryza sativa
  subsp. indica
MAVPKKRTSMSKKRIRKNLWKKKTYFSIVQSYSLAKSRSFSGVSEHPKPKGFSRQQTNK

SEQ ID NO: 3468 - protein, 53 aa, Saccharomyces cerevisiae
  strain ATCC 204508 / S288c
MRNLHHLRVGHEAHSTHHLWMWKHLRRRAISELRILRNFIRKCIRGGVFLWII

SEQ ID NO: 3469 - protein, 82 aa, Saccharomyces cerevisiae
  strain ATCC 204508 / S288c
MFWEKLEKVSNIMIEKKLVNLDGTSANEENTMKPWQMIKILMDRDLRHAMKEFKLELEKSGIQLGPEQLAPLMTVLGLEKKK

SEQ ID NO: 3470 - protein, 344 aa, Sus scrofa
MVRPKHQPGGLCLLLLLLCQFMEDRSAQAGNCWLRQAKNGRCQVLYKTELSKEECCSTGRLSTSWTEEDVNDNTLFKWMIFNGGAPNCIPCKETCENVDCGPGKKCRMNKKNKPRCVCAPDCSNITWKGPVCGLDGKTYRNECALLKARCKEQPELEVQYQGKCKKTCRDVFCPGSSTCVVDQTNNAYCVTCNRICPEPTSSEQYLCGNDGVTYSSACHLRKATCLLGRSIGLAYEGKCIKAKSCEDIQCTGGKKCLWDFKVGRGRCSLCDELCPESKSEEPVCASDNATYASECAMKEAACSSGVLLEVKHSGSCNSISEDTEEEEEDEDQDYSFPISSILEW

SEQ ID NO: 3471 - protein, 105 aa, Gallus gallus
MPKRKAPAEGEAKEEPKRRSARLSAKPAPPKPEPKPKKAAPKKEKAANDKKEDKKAATKGKKGAKGKDETKQEDAKEENHSENGDTKTNEAPAAEASDDKEAKSE

SEQ ID NO: 3472 - protein, 103 aa, Bos taurus
HPVGGPGPVSELPGLQELLDRLRDRVSELQAEQLRVEPLQQGQGLEETWDSPAAAPAGFLGPHHSILRALRGPKMMRDSGCFGRRLDRIGSLSGLGCNVLRRY

SEQ ID NO: 3473 - protein, 57 aa, Coturnix japonica
MARYRRTRTRSRSRRRRRSRRRRSSRRRRYGRSRRSYRSVGRRRRRYGRRRRRRRRY

SEQ ID NO: 3474 - protein, 174 aa, Gallus gallus
MASQKRSSFRHGSKMASASTTDHARHGSPRHRDSGLLDSLGRFFGGDRHVPRRGFGKDIHAARASHVGSIPQRSQHGRPGDDNPVVHFFKNIVSPRTPPPMQAKGRGLSLTRFSWGGEGHKPGYGSGKFYEHKSAHKGHKGSYHEGQGTLSKIFKLGGSGSRPGSRSGSPVARR

SEQ ID NO: 3475 - protein, 155 aa, Ovis aries
MYKIQLLSCIALTLALVANGAPTSSSTGNTMKEVKSLLLDLQLLLEKVKNPENLKLSRMHTFNFYMPKVNATELKHLKCLLEELKLLEEVLDLAPSKNLNTREIKDSMDNIKRIVLELQGSETRFTCEYDDATVKAVEFLNKWITFCQSIYSTMT

SEQ ID NO: 3476 - protein, 130 aa, Glycine max
MTRIKRGYIARKRRTKIRLFTSSFRGAHSRLTRTITQQKIKALVSAHRDRDRKKRDFRGLWISRINAVIRGNIKVYYIYSNLVYSLYTGQLLLNRKIVAQIAILKQNCLFMIANDIIKTKNPLRLYSGKV

SEQ ID NO: 3477 - protein, 47 aa, Triticum aestivum
KICRRRSAGFKGPCMSNKNCAQVCQQEGWGGGNCDGPFRRCKCIRQC

SEQ ID NO: 3478 - protein, 47 aa, Triticum aestivum
KVCRQRSAGFKGPCVSDKNCAQVCLQEGWGGGNCDGPFRRCKCIRQC

SEQ ID NO: 3479 - protein, 116 aa, Bos taurus
MAGLLKKTTGLVGLAVCETPHERLKILYTKILDVLGHIPKNAAYRKYTEQITNEKLSMVKAEPDVKKLEERLQGGQIEEVILQAENELSLARKMIQWKPWEPLVEEPPASQWKWPI

SEQ ID NO: 3480 - protein, 142 aa, Gallus gallus
MQPRGLLLLLALLLLAAAAEAAKAKKEKMKKEGSECQDWHWGPCIPNSKDCGLGYREGSCGDESRKLKCKIPCNWKKKFGADCKYKFESWGGCSAKTGVKTRSGILKKALYNAECEEVVYVSKPCTAKMKAKAKAKKGKGKD

SEQ ID NO: 3481 - protein, 215 aa, Saccharomyces cerevisiae
  strain ATCC 204508 / S288c
MSCTTDKLIQKYDALVRKTTEHKFAKELCAGTLKDRSLYIYLSQDLQFFETSLRLICKTTSLAPTTHALITLAKKIGFFSNDENSYFHDCLELLAPSLTKEERDNFDNKAIPGVDAYINFLDELRKDASITWPSLVTSLWVAEELYWRWARDTPRAPGLHWKYQKWIDLHDGEHFQTWCEFLKAEVDKFPVEEVESIFVKVSQFEFEFFESCYNA

SEQ ID NO: 3482 - protein, 258 aa, Salmo salar
MKFLVLALTILLAAGTQAFPMQADAPSQLEHVKAALNMYIAQVKLTAQRSIDLLDDTEYKEYKMQLSQSLDNLQQFADSTSKSWPPTPRSSAPSCDATATVRAEVMKDVEDVRTQLEPKRAELTEVLNKHIDEYRKKLEPLIKQHIELRRTEMDAFRAKIDPVVEEMRAKVAVNVEETKTKLMPIVEIVRAKLTERLEELRTLAAPYAEEYKEQMFKAVGEVREKVAPLSEDFKARWAPPPRRPSKSSWLSTRPSARP

SEQ ID NO: 3483 - protein, 154 aa, Phoca sibirica
MGLSDGEWHLVLNVWGKWETDLAGHGQEVLIRLFKSHPETLEKFDKFKHLKSEDDMRRSFDLRKHGNTVLTALGGILKKKGHHEAELKPLAQSHATKHKIPIKYLEFISEAIIHVLHSKHPAEFGADAQAAMKKALELFRNDIAAKIKELGFHG

SEQ ID NO: 3484 - protein, 92 aa, Pisum sativum
MTRSRKKNPFVANHLLKKIKKLNTKGEKAIIKTWSRKSTIIPIMIGHTIAIHNGKEHLPVYITDRMVGHKLGEFSPTLNFGGFAKNDNKSRR

SEQ ID NO: 3485 - protein, 222 aa, Spinacia oleracea
MANMLVASSSKTLPTTTTTTITPKPKFPLLKTPLLKLSPPQLPPLKHLNLSVLKSAAITATPLTLSFLLPYPSLAEEIEKASLFDFNLTLPIIMAEFLFLMFALDKIYYTPLGDFMDKRDASIKEQLSGVKDTSSEVKQLEEQANAVMRAARAEISAALNKMKKETQLEVEAKLAEGRKKIEVELQEALGSLEQQKEDTIKSLDSQISALSDDIVKKVLPVS

SEQ ID NO: 3486 - protein, 92 aa, Gallus gallus
MAKRTKKVGIVGKYGTRYGASLRKMVKKIEISQHAKYTCSFCGKTKMKRKAVGIWHCGSCMKTVAGGAWTYNTTSAVTVKSAIRRLKELKDQ

SEQ ID NO: 3487 - protein, 111 aa, Saccharomyces cerevisiae
  strain ATCC 204508 / S288c
MLGRALRPGWLGITRTVVKKPSCGSYFNRTFQTAINTTMPPMQEGMLSTMMMMTATATRITGTVSEPLNGSNIVMQLDSVMRKRKKKMKKHKLRKRRKREKAERRKLSQGR

SEQ ID NO: 3488 - protein, 121 aa, Saccharomyces cerevisiae
  strain ATCC 204508 / S288c
MSNQALYEKLEQTRTILSVKLAELINMTTIADRNDDDEGSFAQENSELAVATTSVMMVNNQTMQLIKNVQDLLILTRSIKEKWLLNQIPVTEHSKVTRFDEKQIEELLDNCIETFVAEKTT

SEQ ID NO: 3489 - protein, 136 aa, Gallus gallus
  MOD_RES (121)..(121): Any amino acid
GKKEKPEKKAKKSDCGEWQWSVCVPTNGDCGLGTREGTRTGAECKQTTKTQKCKIPCNWKKQFGAECKYQFQAWGECDLNTALKTRTGNLKRALHNADCQKTVTISKPCGKLTKPKPQZEXKKKKKEGKKQEKMLB

SEQ ID NO: 3490 - protein, 386 aa, Saccharomyces cerevisiae
  strain ATCC 204508 / S288c
MKVISLKKDSFNKGGAVITLLPEDKEDLFTVYQIVDKDDELIFKKKFTSKLDEAGKKKSTDLVKLKIKVISEDFDMKDEYLKYKGVTVTDESGASNVDIPVGKYLSFTLDYVYPFTIIKQNFNKFMQKLLNEACNIEYKSDTAAVVLQEGIAHVCLVTSSSTILKQKIEYSMPKKKRTTDVLKFDEKTEKFYKAIYSAMKKDLNFDKLKTIILCSPGFYAKILMDKIFQYAEEEHNKKILDNKGMFFIAHCSTGYLQGINEVLKNPLYASKLQDTKYSKEIMVMDEFLLHLNKDDDKAWYGEKEVVKAAEYGAISYLLLTDKVLHSDNIAQREEYLKLMDSVESNGGKALVLSTLHSLGEELDQLTGIACILKYPLPDLDEDDGEE

SEQ ID NO: 3491 - protein, 338 aa, Saccharomyces cerevisiae
  strain ATCC 204508 / S288c
MDKNSVNKDSEEKDERHKIEVVDDTNPDFITADSELTQDLPDDVEVIDLVHLKIKSLEDLNLYRFKNLKQLCLRQNLIESISEVEVLPHDKIVDLDFYDNKIKHISSNVNKLTKLTSLDLSFNKIKHIKNLENLTDLENLYFVQNSISKIENLSTLKSLKNLELGGNKVHSIEPDSFEGLSNLEEIWLGKNSIPRLINLHPLKNLKILSIQSNKLKKIENLEELTNLEELYLSHNFITKIEGLEKNLKLTTLDVTSNKITSLENLNHLSNLTDIWASFNKIDQSFESLGENLSALSRLETIYLEGNPIQLENKTSYRRKLTMNLPPSLQKIDATYIRG

SEQ ID NO: 3492 - protein, 126 aa, Saccharomyces cerevisiae
  strain ATCC 204508 / S288c
MKESLLTLTEKIMFTTTVLKPTITTPITMLITTMRTLVAMKIRHYWKMMAIKDRKIQIPPVKYQMELSIRTLEINLLKNVKETEANLLKRRTDRENKRHYEFGFFYNLRIHNIYIPTSFFFFNSIV

SEQ ID NO: 3493 - protein, 55 aa, Solanum lycopersicum
MAVPKKRTSTSKKRIRKNIWKRKGYWVALKAFSLAKSLSTGNSKSFFVRQTKINK

SEQ ID NO: 3494 - protein, 155 aa, Capra hircus
MYRMQLLSCIALTLALVANGAPTSSSTGNTMKEVKSLLLDLQLLLEKVKNLENLKLSRMHTFNFYMPKVNDTELKHLKCLLEELKLLEDVLDLAPSKNRNTREIKDYMASLKGIVLELQGSETRFTCEYDDATVKAVEFQNKWTTFCQSIYSTLT

SEQ ID NO: 3495 - protein, 68 aa, Equus caballus
MDPETCPCPTGGSCTCSGECKCEGCKCTSCKKSCCSCCPAECEKCAKDCVCKGGEGAEAEAEKCSCCQ

SEQ ID NO: 3496 - protein, 106 aa, Saccharomyces cerevisiae
  strain ATCC 204508 / S288c
MAKSLRASSHLNAKSVKRRGVFQKAVDAREQRISDKLKEDLLKQKLEDLKKKEEQGIDMDVDEKKSNEEAPRKKISTSGWRDGRHHTYKKAKLMKQSKKKTSFTRF

SEQ ID NO: 3497 - protein, 187 aa, Saccharomyces cerevisiae
  strain ATCC 204508 / S288c
MSVSLEQTLGFRIKVTNVLDVVTEGRLYSFNSSNNTLTIQTTKKNQSPQNFKVIKCTFIKHLEVIGDKPSFNSFKKQQIKPSYVNVERVEKLLKESVIASKKKELLRGKGVSAEGQFIFDQIFKTIGDTKWVAKDIIILDDVKVQPPYKVEDIKVLHEGSNQSITLIQRIVERSWEQLEQDDGRKGG

SEQ ID NO: 3498 - protein, 125 aa, Saccharomyces cerevisiae
  strain ATCC 204508 / S288c
MPSKDPESVIDKEIRKISARNDELIKQDGTLKREYTTLLRKVSSVITVLNSIDDADTGSAETELPRLISQATVEKVPELKWYNDQISLITEKLEDDEDIEVPEELMDAYTLYKETPLLYNDTHTP

SEQ ID NO: 3499 - protein, 109 aa, Saccharomyces cerevisiae
  strain ATCC 204508 / S288c
MRFLPRKSRLLMSMRDFYYGLKKLHFCSFPNDIRPPHKKTFLLHSIRSIEAVFGTSDFIKLLGANSTFRLNKLECVENLSSILKKVFALSVINRKLKHLPKATSLPYEK

SEQ ID NO: 3500 - protein, 296 aa, Saccharomyces cerevisiae
  strain ATCC 204508 / S288c
MDYFNIKQNYYTGNFVQCLQEIEKFSKVTDNTLLFYKAKTLLALGQYQSQDPTSKLGKVLDLYVQFLDTKNIEELENLLKDKQNSPYELYLLATAQAILGDLDKSLETCVEGIDNDEAEGTTELLLLAIEVALLNNNVSTASTIFDNYTNAIEDTVSGDNEMILNLAESYIKFATNKETATSNFYYYEELSQTFPTWKTQLGLLNLHLQQRNIAEAQGIVELLLSDYYSVEQKENAVLYKPTFLANQITLALMQGLDTEDLTNQLVKLDHEHAFIKHHQEIDAKFDELVRKYDTSN

SEQ ID NO: 3501 - protein, 144 aa, Ipomoea nil
MKGGKSKAKSDNKLAVKKQAADTKKTKKAVKDPNKPKRPPSAFFVFMEDFRKTYKEKHPNNKSVAVVGKAGGDKWKQLTAAEKAPFISKAEKRKQEYEKNLQAYNKKQAAGAAEEEESDKSRSEVNDDDEDQDGSGEDDSEDDD

SEQ ID NO: 3502 - protein, 149 aa, Vicia faba
MKGGKSKGESKKAETKLAVNKKGAAATKGGKKPAKGKEPKDPNKPKRPPSAFFVFMADFREQYKKDHPNNKSVAAVGKACGEEWKSLSEEEKAPYVDRALKKKEEYEITLQAYNKKLEGKDDEEGSDKSKSEVNDEDEDEEDEEDEDDD

SEQ ID NO: 3503 - protein, 88 aa, Pinus thunbergii
MINNLSISSSLIPDKQRGSVESQVFYLTNRVLRLTQHLQLHGRDYSSQRGLWKILSKRKQLLVYLSKRDKLRYDDLIGQLGIRGLKTR

SEQ ID NO: 3504 - protein, 63 aa, Actinidia deliciosa
MSDKCGNCDCADSSQCVKKGNSIDIVETDKSYIEDVVMGVPAAESGGKCKCGTSCPCVNCTCD

SEQ ID NO: 3505 - protein, 296 aa, Saccharomyces cerevisiae
  strain ATCC 204508 / S288c
MDSLEARLQFIQVLKNLQKTLHKTRDSITSSSTTTPPSSQQKLNNDPIQFYLRNYRHHYEDFHQCLFDTTMKMDPLDRLDVVIYYVRIIRNLYPHSHSNTNVTKVLNEVLLMDIDLVFELCLPCQDWKSLTNQATCKELFLDLSKLIHYDATSVTHTPSDTTLIDATTWYSVKTERTTKDYKESLQRTESLLKDRDLKKLAFFQQFNSDTTAINPDLQTQPTNANILLHRMEADRELHKRSKETSWYIERPSNDILDESEFKSLWTHFETTDSGFDKDDYKNIKALNDIAKASYIY

SEQ ID NO: 3506 - protein, 109 aa, Saccharomyces cerevisiae
  strain ATCC 204508 / S288c
MSQIAQEMTVSLRNARTQLDMVNQQLAYLDRQEKLAELTKKELESYPTDKVWRSCGKSFILQDKSKYVNDLSHAETVLLDQRKTLKIKKNYLETTVEKTIDNLKALMKN

SEQ ID NO: 3507 - protein, 663 aa, Saccharomyces cerevisiae
  strain ATCC 204508 / S288c
MPFQDYFQKKKAAFINRNNKSNADASALRDINDININFAAKSKNYVFPLTKLPDELMQEVFSHLPQPDRLQLCLVNKRLNKIATKLLYRRIYLNDSNVVKSDFMHLAINWTLLNLPSSLKEEESRDIANCKLKKLIETLQNNIHITEVIQWIRINWDLDSTLQRSILSILCNQGKSLQRLENVTDPACNDIISNGHFSRSNVSSFDMAPPNSLPEMVVPENYIPNLTKYLSQRISSRLSHMTLFIDPLKLFNYLYPLDIKLQIIDLKLHWRREFYNNDYFVKKIRPGNPLTKLSEVFDKRTLKILTIISWNDTLLKRETEMLKDFKEFENLEDLSLISIKQDVHILVDLFSSLTNLKRLKMDFLEEYVPEPTNPHIFLSILLACSKLQFIDLRYDGLIPQIINIQENKFQLNQQCNCTNCQIVFSDILKGKIFMFPEDYYIHDLQDIAAKDIFKMMKYLSLLPYSKACDAYPSVRTQPMNLTNFVTKMNRNLLEYRNSKSQLVPKIVNNPHQHSTVTSTSTAHMSEPEMIIIDDDDDDDEINAAIPPSSDDTAATISTDLELPHESLTKRDIIMCYHALIHHFKSIYVTFLKSFPHLRFLMLNDIPTIVMEENNERIFEPVFYHYDYKSNLYGWSKESNKNLENDSNNNNNNSDTIARIATVM

SEQ ID NO: 3508 - protein, 144 aa, Triticum aestivum
MPKNKGKGGKNRKRGKNEADDDKRELVFKEDGQEYAQVTRMLGNGRCEAICVDGTKRLCHIRGKMHKKVWIAAGDIVLVGLRDYQDDKADVILKYMNDEARLLKAYGELPDTVRLNEGVDVDGPEEGEGDSDYIQFEDEDIDKI

SEQ ID NO: 3509 - protein, 344 aa, Bos taurus
MARPRHQPGGLCLLLLLLCQFMEDRSAQAGNCWLRQAKNGRCQVLYKTELSKEECCSTGRLSTSWTEEDVNDNTLFKWMIFNGGAPNCIPCKETCENVDCGPGKKCRMNKKNKPRCVCAPDCSNITWKGPVCGLDGKTYRNECALLKARCKEQPELQVQYQGKCKKTCRDVFCPGSSTCVVDQTNNAYCVTCNRICPEPTSSEQYLCGNDGVTYPSACHLRKATCLLGRSIGLAYEGKCIKAKSCDDIQCTGGKKCLWDFKVGRGRCSLCGELCPESKSEEPVCASDNATYASECAMKEAACSSGVLLEVKHSGSCNSISEDTEDEEEDEDQDYSFPISSILEW

SEQ ID NO: 3510 - protein, 417 aa, Saccharomyces cerevisiae
  strain ATCC 204508 / S288c
MDEVLPLFRDSHIPQIKDYQLELQNDLTKTNEAFQKNLLKNYNKILSLTDSVNDLSLNLKNVDQDFKSLCFNDEKFQLNKLTPLPYQTTTHISPPRDEEKVSIPSQNILVISNWTISINNFCNRIVTSTTPSRIFDELLLNFHELSLIPVPSKFEALVKDKCCRLQKFLVDSMKTLNLTLLQWVKLYNLLNTEFSSKWDDDLLSIFNESLFETLFNDNVQALLISSANSKDHQYHSNQQYKDAIVVDFVNSSTFRDHLIRRTVKEINTHLDTLSTLRAKLKEPETLHKLDIFHDNDTNLNDGTVSPLDDDALKQYIDTAVFYSKGLTNDTTLQIYQTVQPTIEILQNLELYKCPQETLTDLRNKLITQLQEFKTQISSRLPSPLENSTSVVDDFITSYNNHNLLQLVIDQITQLRQQ

SEQ ID NO: 3511 - protein, 271 aa, Saccharomyces cerevisiae
  strain ATCC 204508 / S288c
MGLAATRTKQRFGLDPRNTAWSNDTSRFGHQFLEKFGWKPGMGLGLSPMNSNTSHIKVSIKDDNVGLGAKLKRKDKKDEFDNGECAGLDVFQRILGRLNGKESKISEELDTQRKQKIIDGKWGIHFVKGEVLASTWDPKTHKLRNYSNAKKRKREGDDSEDEDDDDKEDKDSDKKKHKKHKKHKKDKKKDKKDKKEHKKHKKEEKRLKKEKRAEKTKETKKTSKLKSSESASNIPDAVNTRLSVRSKWIKQKRAALMDSKALNEIFMITND

SEQ ID NO: 3512 - protein, 189 aa, Saccharomyces cerevisiae
  strain ATCC 204508 / S288c
MLEAKMVMVVPTIEDQAMIVLHPKILSQSVVMHIKGQNYQLDLVKVKHIMIEVGHLDPQVRTGAMVLIKGITAYVKSIRKTVHNVHNYGFLKSHFKRAKTAAKPTLTKLHLTSATRLQKMKKSRIKDSRRMKQLETNFKRKIIEIHEIAVLPIEPMKIKGTTEIERAILRRFRKVPRVGITSVGTRGNY

SEQ ID NO: 3513 - protein, 246 aa, Saccharomyces cerevisiae
  strain ATCC 204508 / S288c
MESIFGGFGDLVVPRPKEHLGQTDLSFGGKLLPALKICEDGGESGCGGKVWIAGELLCEYILEKSVDHLLSKTVNGTKQFKKVLELGSGTGLVGLCVGLLEKNTFHDGTKVYVTDIDKLIPLLKRNIELDEVQYEVLARELWWGEPLSADFSPQEGAMQANNVDLVLAADCVYLEEAFPLLEKTLLDLTHCINPPVILMAYKKRRKADKHFFNKIKRNFDVLEITDFSKFEHYLKERTHLFQLIRK

SEQ ID NO: 3514 - protein, 68 aa, Sus scrofa
MDPETCPCPTGGSCTCAGSCKCEGCKCTSCKKSCCSCCPAECEKCAKDCVCKGGEGAEAEEEKCSCCQ

SEQ ID NO: 3515 - protein, 93 aa, Triticum aestivum
MTRKKTNPFVAHHLLAKIEKVNMKEEKETIVTWSRASSILPTMVGHTIAIHNGKEHIPIYITNPMVGRKLGEFVPTRHFTSYENARKDTKSRR

SEQ ID NO: 3516 - protein, 298 aa, Lactobacillus johnsonii
MNKTWKKAATVLAFAGIALSATACSGGKAVVTYKGGKITESQYYDKMKESQAGQSTLASMIVSDALESQYGKDVTQKQVDKEYNKYKKQYGSQFDSVLEQNGMTASTFKDNLKTNLLTEAALKHIKKITPAQEKKAWKNYQPEVTVQHILVSKKSTAEDVIKQLQDGGDFKKLAKKYSTDTATKNDAGKLPAFDSTDSTLDSSFKTAAFKLKTGEITTTPVKTQYGYHVIKMIKHPAKGTFKEHKKQIDNQIYQSMSEDQNVMRSVIATVLKRADVSIKDKDLKNVLSQYVSSDSLSK

SEQ ID NO: 3517 - protein, 52 aa, Brassica rapa
MAVPKKRTSISKKRIRKKIWKRKGYWTSLKAFSLGKSLSTGNSKSFFVQQNK

SEQ ID NO: 3518 - protein, 154 aa, Phoca vitulina
MGLSDGEWHLVLNVWGKVETDLAGHGQEVLIRLFKSHPETLEKFDKFKHLKSEDDMRRSEDLRKHGNTVLTALGGILKKKGHHEAELKPLAQSHATKHKIPIKYLEFISEAIIHVLHSKHPAEFGADAQAAMKKALELFRNDIAAKYKELGFHG

SEQ ID NO: 3519 - protein, 180 aa, Lactobacillus plantarum
MAREVVDAMTMRRALTRITYEIIEQNKGVGNLVFIGIKTRGIFLAQRLAQRLKQLEGVDVPVGSLDITLYRDDHHAVDVAGQAKLNGADIPVDINGKHVILVDDVLFTGRTVRAALDALMDHGRPAKISLAVLVDRGHRELPIRPDFIGKNIPTALDEQVSVALEEHDGHDGISIEKLEE

SEQ ID NO: 3520 - protein, 90 aa, Sus scrofa
MPKRKAEGDAKGDKAKVKDEPQRRSARLSAKPAPPKPEPKPKKAPAKKGEKVPKGKKGKADAGKDGNNPAENGDAKTDQAQKAEGAGDAK

SEQ ID NO: 3521 - protein, 97 aa, Zea mays
EVASDDVAAEEAAAAPKIGRRVRVTAPLRVYHVLKAPDLDIQGMEGVVKQYVCVWKGKRVTANFPFKVEFELAVEGQPKPVRFFAHLREDEFEFVDG

SEQ ID NO: 3522 - protein, 171 aa, Sus scrofa
ASQKRPSQRHGSKYLASASTMDHARHGFLPRHRDTGIDSLGRFFGADRGAPKRGSGKDGHHAARTTHYGSLPQKAQHGRPQDENPVVHFFKNIVTPRTPPPSQGKGRGLSLSRFSWGAEGQKPGFGYGGRAPDYKPAHKGLKGAQDAQGTLSKIFKLGGRDSRSGSPMARR

SEQ ID NO: 3523 - protein, 46 aa, Beta vulgaris
ATCRKPSMYFSGACFSDTNCQKACNREDWPNGKCLVGFKCECQRPC

SEQ ID NO: 3524 - protein, 87 aa, Bos taurus
MAKHLKFIARTVMVQEGNVEGAYRTLNRILTMDGLIEDIKRRRYYEKPCRRRQRESYETCRRIYNMEMARKINFLMRKNRADPWQGC

SEQ ID NO: 3525 - protein, 172 aa, Equus caballus
ASQKRPSQRHGSKYLASASTMDHARHGFLPRHRDTGILDSLGRFFGGDRGVPKRGSGKDGHHAARTTHYGSLPQKSRDGRPQDENPVVHFFKINVTPRTPPPSQGKGRGLSLSRFSWGAEGQKPGFGYGARASDYKSTHKGLKGVHDAQGTLSRIFKLGGRDSRSGSPMARR

SEQ ID NO: 3526 - protein, 154 aa, Bubalus bubalis
MGLSDGEWQLVLNAWGKVETDVAGHGQEVLIRLFTGHPETLEKFDKFKHLKTEAEMKASEDLKKHGNTVLTALGGILKKKGHHEAEVKHLAESHANKHKIPVKYLEFISDAIIHVLHDKHPSDFGADAQAAMSKALELFRNEMAAQYKVLGFHG

SEQ ID NO: 3527 - protein, 137 aa, Bos taurus
MGAHLARRYLGDASVEPDPLRMPTFPPDYGFPERKEREMVATQQEMNDAQLVLQQRDYCAHYLIRFLKCKRDSFPNFLACKHERHDWDYCEHLDYVKRMKEFERERRLLQRKKRREQREADMAKGLGPGEVAPEVAL

SEQ ID NO: 3528 - protein, 229 aa, Lactobacillus casei
  strain ATCC 334
MDQNKLKQEAAQRAAEFVEDGMTIGLGTGSTVVYLVEAIAQRIKDEHLNLTGVATSVRTRKQAESLGIPMKALDEVGQIDLTIDGADEVDKHFQGIKGGGRSHLIEKIVAINSARNIWIVDETKLVDTLGKFPLPLEVIPFGSGKLLQRLADEGLKPAYRLNEDGSKALTDSKNYIIDLHLGKIEHPHLLAEWLNKQVGIVEHGLFLDLVKTVVVGTTHGPEILDAHRG

SEQ ID NO: 3529 - protein, 132 aa, Lactobacillus casei
  strain ATCC 334
MVLTDPIADYLTRIRNANMVRHESLVVPASKMKKDISEILKREGFIRDYEVIDDDKQGVIRIFLKYGKNNERVISGLKRISKPGLRSYVKSDAVPKVLNGLGIAIISTSEGVITDKEARAKNVGGEVLAYVW

SEQ ID NO: 3530 - protein, 211 aa, Saccharomyces cerevisiae
  strain ATCC 204508 / S288c
MDSKEYLISYGWKEGEAFREGGLKRPILVKHKRDKKGLGNAPGGNDGEAWWERLFDGHLKNLDVSTDSNNGSIKFTQNEAVATAVSKSSSPLYRWFVKGEGLKGTITNLGKKEEASFVVSSASSSKGKKRRRRDEDDNKVKRKKLKKDKKTSNDSESKKKKKKKSKKESKKGKKSKHSSDEGDKSKHKKSKKSKKHKKEESSARRDRKEHI

SEQ ID NO: 3531 - protein, 61 aa, Lactobacillus casei
  strain ATCC 334
MAKDIITGRHTTFGNKRSHALNSSRRQWKANLHKVRILVDGKPKRVWVSARALKSGKLTRV

SEQ ID NO: 3532 - protein, 77 aa, Saccharomyces cerevisiae
  strain ATCC 204508 / S288c
MIVKVKTLTGKEISVELKESDLVYHIKELLEEKEGIPPSQQRLIFQGKQIDDKLTVTDAHLVEGMQLHLVLTLRGGN

SEQ ID NO: 3533 - protein, 157 aa, Lactobacillus casei
  strain ATCC 334
MAKKHRQKPDNLLAQNKKAGHDYNILDTYEAGIALTGTEIKSVRDGKLNLRDGFARIRNNEAWLENVHISPYKEGNLFNVDPMRNRKLLLHKREIRKLGQMTARQGVTLVPLRMYLKHGYAKVLIGVAEGKHNYDKRETLKRKDQEREVQRALKARY

SEQ ID NO: 3534 - protein, 106 aa, Lactobacillus casei
  strain ATCC 334
MANNEHVTPGEDDQQITLIDEKGNEELYQVLFTFDSEDYGKSYVLLYPASESDDQEVEIQAFSFTPDENGDASSGDLFPIDDDAEWDMVEEVLNTFLADDDSNLKD

SEQ ID NO: 3535 - protein, 250 aa, Lactobacillus gasseri
  strain ATCC 33323 / DSM 20243
MVRELCEVQGLIFKRKKYKEADILTKIMTKDHGIFTIDVRGALRPKSRLGAATLNFSYGKYIVNTNWKGISSLRTFKDVKQLDQLYLDLTKNAYSSYVLDLLDHAFVEYKDIGSFYDLIMKALLKINSGEDVAVITQMVQLKLLNAYGVAPQLDRCLICGKVQGTFDYSLELGGIICSDHFNSVSQRMHLDPKVVALIRTLALIDIDRLGKVKINPQLKKNSGKVIDRMYANYLDLNLKTKKFLDELALF

SEQ ID NO: 3536 - protein, 349 aa, Lactobacillus gasseri
  strain ATCC 33323 / DSM 20243
MTAQINLKDITVQFGPNKAVNNVNLEINKGDIYGVIGFSGAGKSTLVRTINLLQYPSAGSVEVNGTILFKEGKLQVSKKQLQEKRRKIGMIFQNFNLLNEETVIENVAFALQHTHLSDKELEEKSLHLLELVGLKDKSDFYPAQLSGGQRQRVAIARALANDPDILISDEATSALDPKTTNQILDLLYDLNKKLGLTIVLITHEMDAVKRVANKIAVMEKGKVIEKGDLREVFLHPQKQLTRQFVGGALQAQHILNTYNFDKLADNAELYQLVYSINDVTKSVVADLDVSLNTKASILYGNVEVLSGEPIGTLAILLNLDEQKQKEAIKFLESKNVVVTKLDKGVLTND

SEQ ID NO: 3537 - protein, 104 aa, Lactobacillus gasseri
  strain ATCC 33323 / DSM 20243
MSEKINANQDNDRQITLVDDQGNEELFEILFTFTSEDYGKSYVLLYPAAVSDDDDVEVQAFSYDADEDGDVTSSDLHEISDDDEWNMVQGVLNTFLSDDRLSGE

SEQ ID NO: 3538 - protein, 73 aa, Lactobacillus gasseri
  strain ATCC 33323 / DSM 20243
MAKEDVIEVEGKVVDTLPNAMFKVELENGATILAHVSGKIRMHYIRILPGDRVTVELSPYDLTKGRITYRFIK

SEQ ID NO: 3539 - protein, 349 aa, Saccharomyces cerevisiae
  strain ATCC 204508 / S288c
MSPLNVGIVGTGIFARDRHLPSYQEFPDKFKVIAAFNRHKAKALDFAKVADIPENKVYDNLDEILNDPHVDYIDALLPAQFNADIVEKAVKAGKPVILEKPIAANLDQAKEIVKIAESTPLPVGVAENWLYLPCIKIAKEQIEKIGPVVAFTHNSTGPFVTQNKYLTTTWRQKPEHIGGFLSDGGVHQLALVISLLGEFGSVSALTRQVRERSGADDIVFATVQLKNKEVIGSFTYGSAFGATEKSVFLKVYGKNGTVTVDLSDKKDPVVKVKLGGSAEDNGDEQIFKVDNDESFGVNAEFLNFHEAVSKKDKSLYLGTPRTAFHHLACVDAFLKSSAKNGDYVKIEQP

SEQ ID NO: 3540 - protein, 107 aa, Lactobacillus delbrueckii
  subsp. bulgaricus
  strain ATCC BAA-365
MAFEVSAEDQDRQLTLIDEDGNEELFEVLFTFHSDDNDKSYILLYPAAVEDDDEIEVQAFSYDADEDGDVTSSDLHEITSDAEWDMVQGVLNTFLEDDRLSGDDSAE

SEQ ID NO: 3541 - protein, 205 aa, Saccharomyces cerevisiae
  strain ATCC 204508 / S288c
MRWWPWSNQTEDQKQQQQPQGKADGDRVLTNYSRGQKILLEDTPPKFADDLSNSQLAKKQERATLKEAWDSIRWSDFSLQKLTSIPCFRDAGMLGFSSMFLMGSIIFIYHKSPTKATNWAMSSLILGSIVGWEQCRLKRQKSFQIAQLAKETVAKKEKPMLHNVPHDPSLPGQWEAAKNEKQSQFEQSNQNLSQASSEKKWYKFW

SEQ ID NO: 3542 - protein, 283 aa, Lactobacillus delbrueckii
  subsp. bulgaricus
  strain ATCC BAA-365
MGEILDGKKLARELGEKLGSEVDSLKEHGVSPKLCVINIGDDPASKVYVASKKRKAEKLGIKQVVYQLPADESEEDVLKLIDSLNADPEVSSLMVQLPVPPQINADRVIERIDPEKDVDCLTPANIGRLWQGKHFVEPATAAGIIALLDHYQIDLTGKNAVIVGRSNIVGKPLAALMLERNASVSILHSRSRNLADLTKQADILVCAVGKAEMIKADMVKEGAVVIDVGINRVDGHLVGDVDFAPVKEKASWITPVPGGVGPLTVEFLMEEVIKLTRRQHGLD

SEQ ID NO: 3543 - protein, 189 aa, Lactobacillus delbrueckii
  subsp. bulgaricus
  strain ATCC BAA-365
MGLADFKDVDRNELSMIEVAHAILEDRGERMAFADIVNEVQKYLNKSDEEIRQRLPQFYTDMNTDGRFISMGENVWALRTWFKFEAVDEEVDHPEDDGDEESTRKHHKKVNTFLATTEGDDVIDYENDDPEDEDLSDDSDADEDDADDNSGDDYDDNEDDDDDDSLLDGIEDQLSQMDDDDLDDDEDEE

SEQ ID NO: 3544 - protein, 135 aa, Pisum sativum
MVKFLKPNKAVILLQGRYAGKKAVIVKTFDDGTREKPYGHCLVAGIKKFPSKVIKKDSAKKTAKKSRVKAFVKLVNYQHLMPTRYTLDVDLKDAVVPDVLQSKDKKVTALKETKKSLEERFKTGKNRWFFTKLRF

SEQ ID NO: 3545 - protein, 59 aa, Zea mays
MAVPKKRTSMSKKRIRKNLWKKKTYFSIVQSYSLAKSRSFSRGNEHPKPKGFSGQQANK

SEQ ID NO: 3546 - protein, 122 aa, Saccharomyces cerevisiae
  strain ATCC 204508 / S288c
MFLTFSMCVNWIIVKMPNRSEELDRLLDKIINSPHRTEASKTLQEIENNQSYILNVQLKKLLRLHDDSFKNKCVSPINYMLEKYTPYMGHTEALQKEAELVDRDLRILEMTYQLIEKNRNSK

SEQ ID NO: 3547 - protein, 153 aa, Saccharomyces cerevisiae
  strain ATCC 204508 / S288c
MNSEQLLHNYVSDSLLTTLISFQEFKQQLQSYTSDEQQLQHWYELLQARDARVTSELEARIKQFFITLRSRLLRFLESEQLSHSLSLETLIDALYKINDLLQQRLQILDDAIQEKTSELAEFENMVRSPSAGDNAIPGLLQIIQSYINLLEEN

SEQ ID NO: 3548 - protein, 107 aa, Saccharomyces cerevisiae
  strain ATCC 204508 / S288c
MSRHQFDLIMCLKQPGVQTGLLCEKCDGKCPICDSYVRPKRKVRVCENCSFGKQAKNCIICNLNVGVNDAFYCWECCRLGKDKDGCPRILNLGSNRLDRHFEKKKKV

SEQ ID NO: 3549 - protein, 181 aa, Saccharomyces cerevisiae
  strain ATCC 204508 / S288c
MPYKTAIDCIEELATQCFLSKLTDDDVSTFRRVCSKENDIIKLALRIPRTIDYTSILRLLYDTLPLRSLSFNEALPLFCYSIDPAQQRQCDLRFYLRDVVKLARPRKRLEMQKALLQWLPSLLSDVTLQLLNDIRIRFEEIQPNIRQTVLQIYDRTCYPSLNFEHPNLGVFPETDSIFEPV

SEQ ID NO: 3550 - protein, 121 aa, Saccharomyces cerevisiae
  strain ATCC 204508 / S288c
MSNEVDRMDVDEDESQNIAQSSNQSAPVETKKKRFEIKKWTAVAFWSWDIAVDNCAICRNHIMEPCIECQPKAMTDTDNECVAAWGVCNHAFHLHCINKWIKTRDACPLDNQPWQLARCGR

SEQ ID NO: 3551 - protein, 113 aa, Saccharomyces cerevisiae
  strain ATCC 204508 / S288c
MKLVLFKIAVALLYLLSFFLHRLHLRLRHLHRRRRRRHHRRHHRRHHHHRRRRRRRRRRRRRHHRHHHHRHRRRRHYLHLYHQYRSSYYHPPHRYLHPLLLPFPQKHRDNHLV

SEQ ID NO: 3552 - protein, 45 aa, Citrus sinensis
MLLLKHRRIEILDQNTMYGWYELLKQEFLNSEPPELLLTTSKNFH

SEQ ID NO: 3553 - protein, 136 aa, Citrus sinensis
MGKDTIADIITSIRNADMNRKGTVRIASTNITENVVKILLREGFIENARKLVENKNKKEFLVLTLRHRRNRKGPYRPILNLKRISRPGLRIYFNYRRIPRILDGMGIVILSTSRGIMTDRAARLERIGGEILCYIW

SEQ ID NO: 3554 - protein, 117 aa, Citrus sinensis
MTRIRRGYIARRRRTKMRLFVSSFRGAHSRLSRTITQQKIRALVSAHRDRDRKKRDFRRLWITRINAVIRGNLVSYSYSRLIYNLYKAQLVLNRKILAQIAISNRNCLYMISNEIIK

SEQ ID NO: 3555 - protein, 222 aa, Bos taurus
MFPFKVRKWMGLACFRSLVVSSSSIRQKKLIHKLQEEKAFREEMRHFREKIEDFREEMWNFRSKMRAFRGEILGFWEEDRLFWEEEKTFWKEEKAFWEMEKSFREEEKAFWKKYRIFWKEDRAFWKEDNALWERDRNLLQEDKALWEEEKALWVEERALLEEEKVLWEDKKTLWEEENALWEEEKAAWVEGVVPVVEQQVLEGGHHHVSGRPRSPASSRGRA

SEQ ID NO: 3556 - protein, 156 aa, Bos taurus
MMVLDKEDGVPMLSVQPKGKQKGCAGCNRKIKDRYLLKALDQYWHEDCLKCACCDCRLGEVGSTLYTKANLILCRRDYLRLFGTTGNCAACSKLIPAFEMVMRARDNVYHLDCFACQLCNQRFCVGDKFFLKNNMILCQMDYEEGQLNGTFDSHVQ

SEQ ID NO: 3557 - protein, 208 aa, Bos taurus
MEAPPVTMMPVTGGTINMMEYLLQGSVLDHSLESLIHRLRGLCDNMEPETFVDHEMVFLLKGQQASPFVLRARRSLDRAGAPWHLRYLGQPEMGDKNRHALVRNCVDIATSENLTDFLMEMGFRMDHEFVARGHLFRKGIMKIVVYKIFRILVPGNTDNTEALSLSYLVELSVVAPAGQDMVSDDMRNFAEQLKPLVHLEKIDPKRLM

SEQ ID NO: 3558 - protein, 146 aa, Bos taurus
MTLTKGSFTYSSGEEYRGEWKEGRRHGFGQLMFADGGTYLGHFENGLFNGFGVLTFSDGSRYEGEFAQGKFNGVGVFIRHDNMTFEGEFKNGRVDGLGLLTFPDGSHGIPRNEGLFENNKLLRREKCSAVVQRAQSASKSARSLTA

SEQ ID NO: 3559 - protein, 832 aa, Saccharomyces cerevisiae
  strain ATCC 204508 / S288c
MGSSLRSFIKDVRGAKTLADERAIITKQSAKIRTKLRDDHLPHEKRRVNIQKLLYLYILGEKTHFGQVESINLIASDDFVDKRLGYLAATLLLDESEDLLTLLTNMLNNDLHHPNKYAVSLALTSLGFLSSPELARDLYPDVENIIKNSRDPFLLKKALQCAAKLIFKDVSLLEIFNIEDITKILSSHSICTHGVLLGVTKIIQSILLIGLNRKKDEDEDEDGIDYSNDILSPLSLLLRDFFIRLENMNSKNIEPGYDVQGICDPFLQCEIIYTLKLYFQVGELLNSNNVLDYKDNFCDLLTRIATNTDSTKNSGQAILYETVKTIFSLDLNQPLRVLGINILAKFLAGKDNNTKYVSLNTLLKVVPQEPTAVQRHRKFISHCLQDTDVSIRMRALELSFAILDDSNLVELVNELMKFLAKQDEDSKDLIIYTIDHLIDTFDTRVVKDESWKLDVFFNILKLVGSFINYEKINDILIIINNTSQLSDKSEFLRKMLTISLNGTSAEISEENIGWQLVLIWCIGEYGDLVLNEGNKNGADIINESSITDYLLTLQELYTATNLKIINYILTAALKLSVRFHDAKNIEKLRQLILSYTDSTDLSLQMKSNQYEIFFNQSISVKKIILETMPKFEKITEEQDNGKALSKNLISNEPVDLLSDLLGEDSKAESKASTGDNVKPIDILEEIFGEKNDIAQVPKNANKEESINHSSAVEANSGVTLPLDANKIYDSSSLNVYASLLSANSGLAHLDLYFQAKSLISDLKTFCAVPKAQKLTLGQLYPSSTINASQICKQSLKISGSGKLKLRVKLDFHLNGSSSITNEQFDHKFDETL

SEQ ID NO: 3560 - protein, 117 aa, Populus alba
MTRIRRGYIARRRRTKIRLFTSSFRGAHSRLTRTIIQQRIKALFSAYRDRDRHKRNFRCLWVTRINAAIRENAVSYSYSTLINNLYKRQLLLNRKILAQLAILNRNCLYLISNDMIK

SEQ ID NO: 3561 - protein, 85 aa, Bos taurus
MPMVTRRLRDPDVNPCLSESDASTRCMAENNYDKESCSSHFLKYKNCRKFWNSVMIQRRQNGVKPPMPTAAERDEILGGLGKMPY

SEQ ID NO: 3562 - protein, 197 aa, Lactobacillus delbrueckii
  subsp. bulgaricus
  strain ATCC 11842 / DSM 20081
MYEYFEGTITVVNPAYVVIEVAGIGYRILTPTPYAYKDGDKARIYVEQVVRENGMTLYGFKSQQDKVLFNKLNEVSGIGPKSALAIMAAEDNGALASAIESGEVSYLTRFPGIGKKTASQIVLDLRGKMGNYVAENLFTEDEPVKSVFPALEDALLALGALGYSQKEVDRIKPKLKKLPEMSADEYIKQGLGFLLKK

SEQ ID NO: 3563 - protein, 61 aa, Lactobacillus delbrueckii
  subsp. bulgaricus
  strain ATCC 11842 / DSM 20081
MAKDFVTGKKTTFGNTRSHALNSSSRSWKPNLQKVRILVNGKPKRVWVSTKTLKSGKVTRV

SEQ ID NO: 3564 - protein, 189 aa, Lactobacillus delbrueckii
  subsp. bulgaricus
  strain ATCC 11842 / DSM 20081
MGLADFKDVDRNELSMIEVAHAILEDRGERMAFADIVNEVQKYLNKSDEEIRQRLPQFYTDMNTDGRFISMGENVWALRTWFKFEAVDEEVDHPEDDGDEESTRKHHKKVNAFLATTEGDDVIDYENDDPEDEDLSDDSDADEDDADDNSGDDYDDNEDDDDDDSLLDGIEDQLSQMDDDDLDDDEDEE

SEQ ID NO: 3565 - protein, 279 aa, Bos taurus
MTERFDCHHCEDSLFGRKYVLREEQPYCVACFEALFASTCEECGKLIGCDCKDLSYKDRHWHEACFHCSRCRGSLVDKPFAAKEDQLLCTDCYSQEYSSRCQECKKSIMPGTRKMEYKGSSWHETCFICHRCQQPIGTKSFIPKDSENFCVPCYERQYALQCVQCKKPITTGGVTYREQPWHRECFVCTACKKPLSGQRFTSRDEFAYCLGCFCDLYAKKCAGCANPISGLGGTKYISFEERQWHNDCFNCKKCSLSLVGRGFLTERDDILCPDCGKDI

SEQ ID NO: 3566 - protein, 145 aa, Bos taurus
MLSVQPDTKPKGCAGCNRKIKDRYLLKALDKYWHEDCLKCACCDCRLGEVGSTLYTKANLILCRRDYLRLFGVTGNCAACSKLIPAFEMVMRAKDNVYHLDCFACQLCNQRFCVGDKFFLKNNMILCQTDYEEGLMKEGYAPQVR

SEQ ID NO: 3567 - protein, 351 aa, Bos taurus
MRPPAPAVLGLLLLLLPTGEATKKPTPCKRCRELVDKFNQGMVDTAKKNFGGGNTAWEEKTLSKYEFSEVRLLEIVEGLCEASDFECNQLLEEQEELLEAWWLRLKKKHPDLFEWFCVQTLKACCSPGTYGPDCLACQGGSERPCSGNGHCVGDGTREGDGSCQCHLGYQGPLCSDCMDGYFRSPTSETHSICSACDEACKTCVGPTNRDCGQCEVGWVRQDDACVDVDECAAEPPPCEDTQYCENVNGSFVCEECDPTCMGCTGKGPTQCRECIAGYSKESGQCEDIDECSLAEKPCLRDNENCYNTPGSFVCVCPDGFEEAEDTCVQTRPAGAEATEASPTQPPSREDL

SEQ ID NO: 3568 - protein, 117 aa, Gossypium hirsutum
MTRIKRGYIARRRRKKISLFASSFRGAHSRLTRTITQQRIRALVSAHRDRDRKKRDFRRLWITRINAVIRGVGVSYSYSRLIHNLYKKQLLLNRKILAQIAISNRNCLYMISNEIRK

SEQ ID NO: 3569 - protein, 108 aa, Bos taurus
MLLFCPGCGNGLIVEEGQRCHRFACNTCPYVHNVTRKVTNRKYPKLKEVDDELGGAAAWENVDSTAEPCPKCEHPRAYFMQLQTRYADEPMTTFYKCCNAQCGHRWRD

SEQ ID NO: 3570 - protein, 92 aa, Solanum lycopersicum
MTRSLKKNPFVANHLLKKIDKLNTKAEKEIIVTWSRASTIIPTMIGHTIAIHNGKEHLPIYITDSMVGHKLGEFAPTLNFRGHAKSDNRSRR

SEQ ID NO: 3571 - protein, 68 aa, Bos grunniens
MDPETCPCPTGGSCTCSDPCKCEGCTCASSKKSCCSCCPAECEKCAKDCVCKGGEGAEAEEKKCSCCQ

SEQ ID NO: 3572 - protein, 165 aa, Bos taurus
MFLTVKLLLGRRCSLKVSGQESVAMLKKLVSERLHVPEEQQHLLFRGQLLADDKRLSDYRIGPNASISVVVRPLEKPAPEDTRLPQPLWHHLGQVLAKHFGPQDTEAMLQLLRREHEECLQRISLGDLEQLARYLLTKEPLAQPTGEREPEVLSPNKEEEKEAVQ

SEQ ID NO: 3573 - protein, 127 aa, Bos taurus
MAKSLRSKWKRKMRAEKRKKNAPKELSRLKSILKIDGDVLMKDVQEIATVVEPKHCQEKTQCVVKDETDDMKMETDIKRNKKTLLDQHGQYPIWMNQRQRKRLKAKRERKKGKSKVKAMKAAKGLTW

SEQ ID NO: 3574 - protein, 284 aa, Bos taurus
MTTPQFYCQYCMASLLGKKYVLKDDNPYCVSCYDRIFSNYCEECKEPIESGSKDLCYKGHHWHEGCFNCTKCNHSLVEKPFAAKDERLLCSECYSNECSSKCFHCKKTIMPGSRKMEFKGNYWHETCFVCEHCRQPIGTKPLISKESGNYCVPCFEKEFAHYCSFCKKVITSGGITFRDQPWHKECFLCSGCRKELCEEEFMSRDDYPFCLDCYNHLYAKKCAACTKPITGLRGAKFICFQDRQWHSECFNCGKCSVSLVGEGFLTHNKEIFCRKCGSGVDTDI

SEQ ID NO: 3575 - protein, 101 aa, Bos taurus
MSMEKMGKVEEHFQRALELKKMVHRWRNSHTHCLWQITLSQRRNPYAILRMQDTMVQELALANKQLLMVRQAALHQLFEKEHQQYQQELNEKGKAFYMERL

SEQ ID NO: 3576 - protein, 339 aa, Bos taurus
MKDSLVLLSRILAHPDSRCWFLAWNPAGTLLASCGGDRSVRIWGREGDSWICKSVLCEGHQRTVRKVAWSPCGNYLASASFDATTCIWKKNEDDFECVTTLEGHENEVKSVAWAPSGNLLATCSRDKSVWVWEVDEEDEYECVSVLNSHTQDVKHVVWHPSQELLASASYDDTVKLYREEEDDWVCCATLEGHESTVWSLAFDPSGQRLASCSDDRTVRIWRQYLPGNEQGVACSGSEASWKCVCTLSGFHSRTIYDVAWCQLTGTLATACGDDAIRVFEEDPGSDPQQPTFSLTAHVPQAHSQDVNCVAWNPKERGLLASCSDDGELAFWKYQPSEGI

SEQ ID NO: 3577 - protein, 92 aa, Lactuca sativa
MTRSLKKNPFVANNLLKKINKLNTKAEKEIIITWSRASTIIPIMVGHTIAIHNGKEHLPIYITDRMVGHKLGEFAPTLNFRGHAKSDNRSRR

SEQ ID NO: 3578 - protein, 37 aa, Lactuca sativa
MKIRASVRKICEKCRLIRRRGRIRVICSNPRHKQRQG

SEQ ID NO: 3579 - protein, 98 aa, Saccharomyces cerevisiae
  strain ATCC 204508 / S288c
MSGNPGSSLSALRPTPPERGSFPLDHDGECTKYMQEYLKCMQLVQNENAMNCRLLAKDYLRCRMDHQLMDYDEWSHLGLPEDAPGNNGKTIKDATDNK

SEQ ID NO: 3580 - protein, 38 aa, Saccharomyces cerevisiae
  strain ATCC 204508 / S288c
MNVIFKLYLTIDAPKKKKVTVRDFLSIRYSMPYRLASN

SEQ ID NO: 3581 - protein, 85 aa, Saccharomyces cerevisiae
  strain ATCC 204508 / S288c
MPQKPLKVTKKAKDPRRVTKKQKNLRKAAPLQLKSKKKSLQHLKKLKKSSSLTETTERLVASKVGHLELLRGTRKELEKGKKNSK

SEQ ID NO: 3582 - protein, 53 aa, Saccharomyces cerevisiae
  strain ATCC 204508 / S288c
MHILTRSSKNAFPRSRSRQDIHISSHIHRDTSNSALLKILVITRTRLDSFVKT

SEQ ID NO: 3583 - protein, 49 aa, Saccharomyces cerevisiae
  strain ATCC 204508 / S288c
MWRRRREPWEELSFLLNSLSPRNWFIRRWGLMAGRGQHLCWLRCACDGP

SEQ ID NO: 3584 - protein, 45 aa, Saccharomyces cerevisiae
  strain ATCC 204508 / S288c
MKMNYHLSTSSYTTSMLSCTVLDDDIRYEKLSWKLDEAEMQGLIM

SEQ ID NO: 3585 - protein, 104 aa, Bos taurus
MAEGEGWRPPRPCEAYRAEWELCRSAGHFLRHYYVHGERPACGQWRRDLASCREWEERRSAEAQADSLPPGPEGEPRVAGAGPNAVTGILTRNQGTERPHGDTR

SEQ ID NO: 3586 - protein, 170 aa, Bos taurus
MSSNECFKCGRSGHWARECPTGGGRGRGMRSRGRGFQFVSSSLPDICYRCGESGHLAKDCDLQEDACYNCGRGGHIAKDCKEPKREREQCCYNCGKPGHLARDCDHADEQKCYSCGEFGHIQKDCTKVKCYRCGETGHVAINCSKTSEVNCYRCGESGHLARECTIEATA

SEQ ID NO: 3587 - protein, 148 aa, Bos taurus
MAESDWDTVTVLRKKGPTAAQAKSKQAILAAQRRGEDVETSKKWAAGQNKQHSITKNTAKLDRETEELHHDRVTLEVGKVIQQGRQSKGLTQKDLATKINEKPQVIADYESGRAIPNNQVLGKIERAIGLKLRGKDIGKPIEKGPRAK

SEQ ID NO: 3588 - protein, 73 aa, Bos taurus
MIEVVCNDRLGKKVRVKCNTDDTIGDLKKLIAAQTGTRWNKIVLKKWYTIFKDHVSLGDYEIHDGMNLELYYQ

SEQ ID NO: 3589 - protein, 86 aa, Bos taurus
MSLPLNPKPFLNGLTGKPVMVKLKWGMEYKGYLVSVDGYMNMQLANTEEYIDGALSGHLGEVLIRCNNVLYIRGVEEEEEDGEMRE

SEQ ID NO: 3590 - protein, 92 aa, Acorus calamus
MTRSLKKNPFVANHLLEKIEKLNMKEEKEIIVTWSRASTIIPTMIGHTIAIHNGKEHLPIYITDRMVGHKLGEFAPTLTFRGHARNDNKSRR

SEQ ID NO: 3591 - protein, 139 aa, Bos taurus
MLPLSLLKTAQNHPMLVELKNGETYNGHLVSCDNWMNINLREVICTSRDGDKFWRMPECYIRGSTIKYLRIPDEIIDMVKEEVVAKGRGRGGLQQQKQQKGRGMGGAGRGVFGGRGRGGIPGTGRGQPEKKPGRQAGKQ

SEQ ID NO: 3592 - protein, 177 aa, Lactobacillus johnsonii
MTKYSTELKIEIVSKYLNHEDSIKGLAKQYNIHWTLIRRWVDKAKCQGLAALSVKHTKTTYSSDFKLNVVRYYLTHSIGVSKVAAKFNISDSQVYNWAKKFNEEGYAGLLPKQKGRPRKVPKKSKKTTKKLELSEKQKYEEKILKQEAELERLRVENLVLKKVAARYPRYPTNKKHN

SEQ ID NO: 3593 - protein, 37 aa, Cucumis sativus
MKIRASIRKICEKCRLIRRRRRIMVICSNPRHKQRQG

SEQ ID NO: 3594 - protein, 222 aa, Bos taurus
MGLFGKTQEKPPKELVNEWSLKIRKEMRVVDRQIRDIQREEEKVKRSVKDAAKKGQKDVCVVLAKEMIRSRKAVSKLYASKAHMNSVLMGMKNQLAVLRVAGSLQKSTEVMKAMQSLVKIPEIQATMRELSKEMMKAGIIEEMLEDTFESMDDQEEMEEAAEMEIDRILFEITAGALGKAPSKVTDALPEPEPLGAMAASEDEEEEEEALEAMQSRLATLRS

SEQ ID NO: 3595 - protein, 152 aa, Bos taurus
MAKSKNHTTHNQSRKWHRNGIKKPRSQRYESLKGVDPKFLRNMRFAKKHNKKGLKKMQANNAKAMSARAEAVKALVKPKEIKPKMPTGGSRKLSRLAYIAHPKLGKRARARIAKGLRLCRPKSQAKASTKAKPPAAAAPAAKGAQAPTKAPE

SEQ ID NO: 3596 - protein, 79 aa, Bos taurus
MSEFWHKLGCCVVEKPQPKKKRRRIDRTMIGEPMNFVHLTHIGSGEMGAGDGLAMTGAVQEQMRSKGNRDRPWSNSRGL

SEQ ID NO: 3597 - protein, 133 aa, Bos taurus
MNYMPGTASLIEDIDKKHLVLLRDGRTLIGFLRSIDQFANLVLHQTVERIHVGKKYGDIPRGIFVVRGENVVLLGEIDLEKESDTPLQQVSIEEILEEQRVEQQTKLEAEKLKVQALKDRGLSIPRADTLEEY

SEQ ID NO: 3598 - protein, 567 aa, Bos taurus
MHGRLKVKTSEEQAEAKRLEREQKLKLYQAATQTVFQKRQAGELDESVLELTSQILGANPDFATLWNCRREVLQQLEVQKSPEELATLVKAELGFLESCLRVNPKSYGTWHHRCWLLSRLPEPNWARELELCARFLEVDERNFHCWDYRRFVAAQAAVPPAEELAFTDSLITRNFSNYSSWHYRSCLLPQLHPQPDSGPQGRLPEDVLLKELELVQNAFFTDPNDQSAWFYHRWLLGRADPQDALRCLHVSRDEACLTVSFSRPLLVGSGMETLLLMVDESPLAVEWRTPEGRNRPSHIWLCDLPATSLNDQLPQHTFRVIWTAGDAQKECVLLKGRQEGWCRDSATDEQLFRCELSVEKSTVLQSELESCKELQELEPENKWCLLTIILLMRALDPLQYEKETLQYFQTLKAVDPMRAAYLDDLRSKFLLENSVLKMEYAEVRVLHLGHKDLTVLCHLEQLLLVTHLDLSHNRLRALPPALAALRCLEVLQANDNAIESLDGVTNLPRLQELILCNNRLQQPAVLQPLTSCPRLTLLNLQGNPLCQAEGSSEHLAELLPSVSSILT

SEQ ID NO: 3599 - protein, 529 aa, Gallus gallus
MSSNLGKEKDCKEKDPKVPSSKEREKESKASGGFGKESKEKEPKTKGKDAKDGKKDSSSTQPGVAFSVDNTIKRPNPATGTRKKSSNAEVIKELNKCREENSMRLDLAKRSIHMLPSAVKELTQLTELYLYSNKLQSLPAEVGCLVNLVTLALSENSLTSLPDSLDNLKKLRMLDLRHNKLREIPSVVYRLTSLATLYLRFNRITTVEKDIKTLSKLTMLSIRENKIKQLPAEIGELCNLITLDVAHNQLEHLPEEIGSCTQITNLDLQHNELLDLPETIGNLSSLSRLGLRYNRLSAIPKSLAKCSELDELNLENNNISTLPEGLLSSLVKLTSLTLARNCFQSYPVGGPSQFSTIYSLNMEHNRINKIPFGIFSRAKVLSKLNMKDNQLTSLPLDFGTWTSMVELNLATNQLTKIPEDVSGLVSLEVLILSNNLLKKLPHGIGNLRKLRELDLEENKLESLPNEIAYLKDLQKLVLTNNQLTTLPRGIGHLTNLTHLGLGENLLTHLPEEIGKILFFFFFNVSFLFV

SEQ ID NO: 3600 - protein, 239 aa, Lactobacillus acidophilus
MKVIVTENKIQGSAKAFEIFEKGIKNGAKVLGLATGSTPEILYQNWVKSDLNCDDLTSINLDEYVGLTPDNPQSYHYFMQKHLFDKKTFKKTYIPDGMTKDVPAYCKEYDQIIKDNPIDIQLLGIGQNGHIAFNEPGTPFDIGTHEVKLTENTIKANARFFDNEDEVPKSAICMGTANIMDSKKIVLMAFGEKKAKAIKEMIEGPITEEVPASILQKHPDVTVIVDTYAAQELDDKYKN

SEQ ID NO: 3601 - protein, 61 aa, Lactobacillus acidophilus
MAKDYVTGKKTTFGNKRSHSLNPTRRAWKPNLQKVRILVDGKPKRVWVSTKALKSGKVTRV

SEQ ID NO: 3602 - protein, 157 aa, Lactobacillus acidophilus
MAKVESFTLDHTKVKAPYVRLITVEEGPKGDKISNYDLRLVQPNENAIPTGGLHTIEHLLASLLRDRLDGVIDCSPFGCRTGFHLIVWGEHSTTEVAKALKSSLEEIRDTITWEDVPGTTIKTCGNYRDHSLFTAKEWCRDILEKGISDDPFERNVI

SEQ ID NO: 3603 - protein, 353 aa, Lactobacillus acidophilus
MSIIELKNVDVDFPQKKGKLVKAVNSVSLSIEKGDIYGIVGFSGAGKSTLVRTINLLQKPSAGDIEVDGTQFVKDGKQVISNKELQLKRRNIGMIFQGFNLLNETTVLENVAFALKHEKLSDDELEKKSLELLELVDLKEKANFYPSELSGGQKQRVAIARALANNPDILISDEATSALDPQNTQQILDLLKRLNKQFNLTVILITHEMDAVKKIATKVAVMEHGQVIEKGSLRQVFLHPKQELTKKFVGGSLEAISTLNSLHLDKLSKNESIYQLVYSVNNVAKSIIIELYKEIGVEVSMLYGNVELLNDEPIGTLVVLIKGDQEKQKQAKEFLQKQDVTLTRLDEKGNIYD

SEQ ID NO: 3604 - protein, 103 aa, Lactobacillus acidophilus
MAAQVNGDDNDRQITLIDDQGNEELYEVLFTFHSDDYDKSYVLLYPAAVGDDEDIEVQAFSYDADDTGDVTSSDLHEIESDDEWNMVQGVLNTFLDDDRLSGK

SEQ ID NO: 3605 - protein, 73 aa, Lactobacillus acidophilus
MAKDDVIEVEGKVVDTLPNAMFKVELENGATILAHVSGKIRMHYIRILPGDRVTVELSPYDLTKGRITYRFIK

SEQ ID NO: 3606 - protein, 77 aa, Lactobacillus acidophilus
MFVKTGDKVKVIAGKDKGKEGTVLSVNVKKNRVVVKGVNKIKKHQKPSQTNANGGVVESEGSIHASNVKVISKKEDK

SEQ ID NO: 3607 - protein, 184 aa, Lactobacillus acidophilus
MGLDKFKDKNRDELSMIEVARAILEDNGKRMAFADIVNAVQKYLNKSDEEIRERLPQFYTDMNTDGEFISMGENVWALRSWFPYESVDEEVNHPEDEEEDDSRKHHKKVNAFLASATGDDDIIDYDNDDPEDDDLDAATDDSDDDYSDDDSDYDEDNDDADDVLPDGIEGQLSQLNDEDDDEDD

SEQ ID NO: 3608 - protein, 158 aa, Lactobacillus reuteri
MAKVESFTLDHTKVKAPYVRLITVEEGAKGDKISNYDLRLVQPNENAIPTAGLHTIEHLLAGLLRDRLDGVIDCSPFGCRTGFHLITWGEHSTTEVAKALKSSLEEIAYKTKWEDVQGTTIESCGNYRDHSLFSAKEWSKKILDEGISDKPFERHVVD

SEQ ID NO: 3609 - protein, 114 aa, Gallus gallus
MAKSLRSKWKRKMRAEKRKKNAPKELERLKSILRTGADVVMEEVKEVATVLPAKEALEKQDDCKMDVDNKRNKKTLLDQHGQYPIWMNSRQRKKLKAQRLKGKKKSKLPKGLAW

SEQ ID NO: 3610 - protein, 301 aa, Gallus gallus
MEDATEMSGGAEEFAEGSKINASKNQQDDGKMFIGGLSWDTSKKDLTEYLSRFGEVVDCTIKTDPVTGRSRGFGFVLFKDAASVEKVLELKEHKLDGKLIDPKRAKALKGKEPPKKVFVGGLSPDTSEEQIKEYFGAFGEIENIELPMDTKTNERRGFCFITYTDEEPVKKLLESRYHQIGSGKCEIKVAQPKEVYRQQQQQQKGGKSNASGGRGGGRGRGRGQGQNWNQGFNNYYDQGYGNYNSAYSDQSYSGYGGYDYSGYNYPNYGYGPGYTDYSGQQSTYGKASRGGGNHQNNYQPY

SEQ ID NO: 3611 - protein, 98 aa, Gallus gallus
MPKRKSPEGAEGKDAAKVTKQEPTRRSARLSAKPAPPKPEPKPRKTTKKEPGTKANKGAKGKKDEKQEAAKEGTTPSENGENKAEEAQKTESVGDKNE

SEQ ID NO: 3612 - protein, 110 aa, Gallus gallus
MAHSAPLGLLEQGCPIQVEHDRKRRQFTVRLNGCHDRAVLLYEYVGKRIVDLQHTEVPDAYRGRGIAKHLAKAALDFVVEEDLKAHLTCWYIQKYVKENPLPQYLEHLQP

SEQ ID NO: 3613 - protein, 78 aa, Gallus gallus
MSDFWHKLGCCVVEKPQPKKRRRRIDRSMIGEPMNFVHLTHIGSGDMAAGEGLPMTGAVQEMRSKGGRERQWSSSRVL

SEQ ID NO: 3614 - protein, 599 aa, Gallus gallus; identical to SEQ ID NO: 721

SEQ ID NO: 3615 - protein, 125 aa, Ovis aries [sequence omitted]

SEQ ID NO: 3616 - protein, 73 aa, Saccharomyces cerevisiae
  strain ATCC 204508 / S288c
MIEVVVNDRLGKKVRVKCLAEDSVGDFKKVLSLQIGTQPNKIVLQKGGSVLKDHISLEDYEVHDQTNLELYYL

SEQ ID NO: 3617 - protein, 131 aa, Gallus gallus
MPRPKPRSPRRRGRPPPAAPPPPPARPRARRYRPGQRALREIRRYQSSTALLLRRQPFARVVREICLLFTRGVDYRWQAMALLALQEAAEAFLVHLLEDAYLCSLHARRVTLYPKDLQLARRLRGLQGEGF

SEQ ID NO: 3618 - protein, 282 aa, Lactobacillus johnsonii
MKKLLEGKTPANEIKENLIEEIKKLKSDGINPTLCVIEVGDDPASKIYLRVKRNLAKKVGIKEIGLHFPANTSQAELLEKIEDLNQDPSINGIMVQLPVPPQIDPRAIFETIAPEKDADGFSPLNLGRLWEGQSDVIPATVRSILTLIDYYGIEMAGKNTVIIGRSVIVGKPLAAVLVERDATVTIAHSKTKNLSELTKNADVIISDVGKAHLVTEDMVKEGAVIIDVGMNRENGKLMGDVDFDMVAPKAKAITPVPGGVGPLTVASLMKQAVILTRKQHGR

SEQ ID NO: 3619 - protein, 349 aa, Lactobacillus johnsonii
MAAQIDLKNITVQFGQNKAVNDVSLEINKGDIYGVIGFSGAGKSTLVRTINLLQYPSAGSVEVNGTVLFKDNKLQISKKQLQEKRRKIGMIFQNFNLLNEETVIENVAFALQHSRLSDQELEKKSLHLLELVGLKDKADFYPAQLSGGQQQRVAIARALANDPDILISDEATSALDPKTTNQILDLLYDLNKKLGLTVVLITHEMDAVKRVANKIVVMEKGKVIEKGELREVFLHPQKQLTRQFVGGALQAQHILNTYNFDKLAENAELYQLVYSINDVTKSVVADLDVSLNTKASILYGNVEVLSGEPIGTLAILLNLNELKQKEAIKFLESKNVVVTKLDKGVLTND

SEQ ID NO: 3620 - protein, 250 aa, Lactobacillus johnsonii
MARELCEVQGLIFKRKKYKEADVLTKIMTKDHGIFTIDVRGALRPKSRLGAATLNFSYGKYIVNTNWKGISTLRTFKDVKQLDQLYLDLTKNAYSSYVLDLLDHAFVEYKDIGSFYDLIIKALLKINSGEDAAIITQMVQLKLLNAYGVAPQLDRCLICGKVQGKFDYSLELGGIICSDHFNSVSQRMHLDPKVVALIRTLALVDIDRLGKIKINPQLKKDSGKVIDRMYVNYLDLNLKTKKFLDELALF

SEQ ID NO: 3621 - protein, 180 aa, Lactobacillus johnsonii
MGLDDFQGQNKDELSMIEVARAILQDSGKRMAFADIVNAVQNFLGKSDEEIRERLPQFYTDMNTDGEFISMGHNVWALRSWFPYESVDEEVNHPEDEEDVPRKKHHKKVNAFIGDSDDDDIIDYDSDDPEDEDLDVDEEDTNEDDYSDDDLDDADDNELDDGIEGQLSELHQDDLDDDDE

SEQ ID NO: 3622 - protein, 195 aa, Oryza sativa
  subsp. japonica
MAAESIDAELRLGLPGSGGGDGVAAKKRRSASSTVKSEASGTACCGGAGARDVEDGASPASKVQVVGWPPVGSYRRSTFQSSSSSTAAAAKGKGGGETDQGRKNKGGGLYVKVSMDGAPYLRKVDLRMYGGYRELRDALDALFGCFSADASASAAHFAVAYEDKDGDLMLAGDVPWDMFISSCKKLRIMRGSEAR

SEQ ID NO: 3623 - protein, 88 aa, Pinus koraiensis
MIKNLSISSSLIPDKQRGSVESQVFFLTNRVLRLTQHLQLHGRDYSSQRGLWLILSKRKQLLVYLSKRDKLRYDDLIGQLSIRRLKTR

SEQ ID NO: 3624 - protein, 98 aa, Lactobacillus plantarum
MSQNQDRKDNDVITLVDDEGNETLFNILFTFDSEDFGHSYILLYPADAAADDEVDIQAYIFNPEDGDNGELQLIESDDEWDMVEQVLNTFLADDGGMQ

SEQ ID NO: 3625 - protein, 141 aa, Lactobacillus plantarum
MFFGEFEHALDAKGRLIIPAKFRELLGTSFVITRGMDGCIFGYPAERWATLQAQLDDLPLTRKDARAFVRFFYAAAAECELDKQGRVMIPATLRQYAKLEKQCVIVGVSDRFEIWGAEHWQQFETETAANFDDLAENLIDF

SEQ ID NO: 3626 - protein, 115 aa, Lactobacillus plantarum
MEIEKNYRINSLFEFYEPLLTNKQKAYIQLYYADDYSLGEIAAEFSVSRQAVYDNIKRTEKILEGYEAKLHLYHDFVERNHEVDAISDYIKQNYHGDTQLIKMIQQLVNLEADSE

SEQ ID NO: 3627 - protein, 61 aa, Lactobacillus plantarum
MAKDYVTGKRTHFGNTRSHALNHSRRSWKANLQKVRILVDGKPKKVWVSARTLKSGKVTRV

SEQ ID NO: 3628 - protein, 298 aa, Lactobacillus plantarum
MKKWLIALAGVLLTFTLAGCGSKTVASTSGGKITESQYYSSMKGTSSGKQVLQQMILNKVLEKDYGSKVSTKQVTKQYNTYKSQYGSSFSTVLSQNGLTTKTFKEQLRSNLLLKEAVKDKVKITDKALKKQWKSYEPKVTVQHILVAKSATADKVLDALKKDSSQANFTKLAKKYSTDTTTKNDGGKLSAFDNTNTSYSSKFLTAAFKLKNGEYTTSAVKTSNGYEIIRMIKNPGKGKMSDHTADLKKQIWDNDMSDSTVLQNVVSKVLKGGNVSIKDNDLKDILSSYLSTSSSSSSN

SEQ ID NO: 3629 - protein, 60 aa, Lactobacillus plantarum
MAQLKITLVRSAAHRLPKQRKIVKELGLGRINSSVVKPDDAATRGQIFHIAHLVDVEIIK

SEQ ID NO: 3630 - protein, 199 aa, Lactobacillus plantarum
MELKQFDGQKKSELSLIEVAHAILSQHGDVMAFADLTNAVQSYLGKSDEEIRERLSQFYTDLNIDGSFISLGDNMWGLRAWYPFESIDEAVIHTDDDEDEDRPKRKKVNAFLADAGDDDDVIDYDDDDPEDDDNYDDDDDQDDDTDDSASSKYDELAGVDDTDDDVADETLPDGIEGQLSELNDDDDDDDYDDEDDESK

SEQ ID NO: 3631 - protein, 447 aa, Oryza sativa; identical to SEQ ID NO: 766
  subsp. japonica

SEQ ID NO: 3632 - protein, 145 aa, Equus caballus
MTSRALLLLASALLGTPGLTFSGLNPESYDLATAHLSDGEQFCQGLTQEDLQGDLLTERERQGIACWSCRKILQKLEDLVGEQPNEATINEAASRVCRNLGLLRGACKKIMRTCLRLISRDILAGKKPQEVCVDIKLCKHKAGLI

SEQ ID NO: 3633 - protein, 295 aa, Glycine max
MEFWGVEVKVGQTVTVDPMDPVDSYIHISQVALGEAKKDKPNEPVVLYLKVGEQKIVLGTLSRDGIPHLSLDLVLDSDSELSHTSKSASVFFCGYKVLTGNDNASDFSDSSEEDEELALEGQDNGKPELKAEGAKVTKPSKSIPKIGAPAKAADPKKDEDDDSDDESDDDLAGEDESGSSDEMDDDSNSEEESDGDDEETPAKKVDQGKKRPNESAAKTPISAKKAKTATPEKTDGKKSVHVATPHPSKKGGKTPNSTKGQTPNSAGQLSCASCKKSFTNEAGLQQHKKAKHGGQ

SEQ ID NO: 3634 - protein, 745 aa, Bos taurus; identical to SEQ ID NO: 720

SEQ ID NO: 3635 - protein, 49 aa, Saccharomyces cerevisiae
  strain ATCC 204508 / S288c
MCDWKGRDNCPAPARKTSCVSRAALHSNVRWKWCEKSTLDRASNCWRGT

SEQ ID NO: 3636 - protein, 39 aa, Saccharomyces cerevisiae
  strain ATCC 204508 / S288c
MKVLDDWFSRKFSKAVHGNNHGTISLSTLSYIRVHKLVK

SEQ ID NO: 3637 - protein, 311 aa, Coturnix japonica
MAGELSIGAELPTSPLAMEYVNDFDLMKFDVKKEPLGRNDRSGRHCTRLQPAGSVSSTPISTPCSSVPSSPSFSPTEQKTHLEDLYWMANSYQQMNPEALNLTPEDAVEALIGSHQVSQQLQGFESFRAHHHHHHHHQHHHHQYPAVTHEDLAGSGHPHHHHHHHHHASPTPSTSSSSSQQLQTSHQQHPPSSSVEDRFSDDQLVSMSVRELNRHLRGFTKDEVIRLKQKRRTLKNRGYAQSCRYKRVQQKHHLENEKTQLIQQVEQLKQEVTRLARERDAYKLKCEKLASNGFREAGSTSDNPSSPEFFM

SEQ ID NO: 3638 - protein, 311 aa, Gallus gallus
MAGELSIGAELPTSPLAMEYVNDFDLMKFDVKKEPLGRNDRSGRHCTRLQPAGSVSSTPISTPCSSVPSSPSFSPTEQKTHLEDLYWMANSYQQMNPEALNLTPEDAVEALIGSHQVSQQLQGFESFRAHHHHHHHHHQHHHQYPAVTHEDLAGSGHPHHHHHHHHQASPTPSTSSSSSQQLQTSHQQHPPSSSVEDRFSDDQLVSMSVRELNRHLRGFTKDEVIRLKQKRRTLKNRGYAQSCRYKRVQQKHHLENEKTQLIQQVEQLKQEVTRLARERDAYKLKCEKLASNGFREAGSTSDNPSSPEFFM

SEQ ID NO: 3639 - protein, 144 aa, Bos taurus
MAASKVKQDMPPVGGYGPIDYKRNLPRRGLSGYSMFAVGIGALLFGYWSMMKWNRERRRLQIEDFEARIALMPLLQAEKDRRVLQMLRENLEEEATVMKDVPGWKVGESVFHTTRWVTPMMGELYGLRASEEVLSATYGFIWYT

SEQ ID NO: 3640 - protein, 303 aa, Zea mays
MEFWGLEVKPGSTVKCEPGHGFILHVSQAALGESKKSDSALMYVKVDDKKLAIGTLSIDKYPQIQFDLVFNKEFELSHTSKTTSVFFSGYKVEQPIEGDEMDLDSEDEEEELNIPVIKENGKADGKEEQKNQEKAVAATASKSSLGLEKKSKDDSDDSDEDESDDSDEDDSDDSDEGEGLSPDEGDDDSSDEDDTSDDDEEETPTPKKPEAGKKRGAENALKTPLSDKKAKVATPPAQKTGGKKGATHVATPHPAKGKTPANNDKLTEKSPKSGGSVPCKSCSKTFNSEMALQAHSKAKHGAK

SEQ ID NO: 3641 - protein, 1474 aa, Ovis aries; identical to SEQ ID NO: 756

SEQ ID NO: 3642 - protein, 1462 aa, Ovis aries; identical to SEQ ID NO: 757

SEQ ID NO: 3643 - protein, 111 aa, Bifidobacterium adolescentis
  strain ATCC 15703 / DSM 20083 / NCTC 11814 / E194a
MAAKIKSGDLVKVIRGKDRGKEGTVKQVLKDDRLIVEGVQIVKKHVRATQQGQQAGIVAVEAPIHRSNVMVIDPETKQPTRVRIVEKEEARDGKVKTVRVRVAKKSGKELA

SEQ ID NO: 3644 - protein, 37 aa, Bifidobacterium adolescentis
  strain ATCC 15703 / DSM 20083 / NCTC 11814 / E194a
MKVSPSVKRICENCRVIRRHGRVMVICVNPRHKQRQG

SEQ ID NO: 3645 - protein, 125 aa, Bifidobacterium adolescentis
  strain ATCC 15703 / DSM 20083 / NCTC 11814 / E194a
MARLAGVDIPNEKRIEIALTYIFGVGRTRAKETLAATGINPDIRVKDLTDEQLITLRDYLEGNYKIEGDLRREIDADIRRKIQINCYQGQRHRKGLPVRGQRTKTNARTRKGPKRTVAGKKKATK

SEQ ID NO: 3646 - protein, 86 aa, Bifidobacterium adolescentis
  strain ATCC 15703 / DSM 20083 / NCTC 11814 / E194a
MANIKSQKKRVLTNEKAHKRNVAVKSSLKTAVRATREAIAAGDKAAAEAAYKVAAQKLDKAAGAGVIHKNQAANRKSGLAVAINAL

SEQ ID NO: 3647 - protein, 64 aa, Bifidobacterium adolescentis
  strain ATCC 15703 / DSM 20083 / NCTC 11814 / E194a
MPKMKTNSAASKRVRVTGSGKLMHAGSAMRHNLEHKSARKRRELKADGVLATSQSKNMKKLLGR

SEQ ID NO: 3648 - protein, 64 aa, Bos taurus
MSGREGGKKKPLKQPKKQAKEMDEEDKAFKQKQKEEQKKLEELKAKAAGKGPLATGGIKKSGKK

SEQ ID NO: 3649 - protein, 344 aa, Aspergillus niger; identical to SEQ ID NO: 420
  strain CBS 513.88 / FGSC A1513

SEQ ID NO: 3650 - protein, 427 aa, Aspergillus niger; identical to SEQ ID NO: 409
  strain CBS 513.88 / FGSC A1513

SEQ ID NO: 3651 - protein, 149 aa, Oryza sativa
  subsp. indica
MADQLTDDQIAEFKEAFSLFDKDGDGCITTKELGTVMRSLGQNPTEAELQDMINEVDADGNGTIDFPEFLNLMARKMKDTDSEEELKEAFRVFDKDQNGFISAAELRHVMTNLGEKLTDEEVDEMIREADVDGDGQINYDEFVKVMMAK

SEQ ID NO: 3652 - protein, 65 aa, Oryza sativa
  subsp. indica
MSDKCGHCDCADKSQCVKKGTSYGVVIVDAEKSHFEMAEEVGYEENDGKCKCTTGCSCAGCNCGK

SEQ ID NO: 3653 - protein, 200 aa, Oryza sativa
  subsp. indica
MASHQDQASYRAGETKAHTEEKAGQVMGASKDKASEAKDRASEAAGHAAGKGQDTKEATKEKAQAAKERASETAQAAKDKTSGTAQAARDKAAESKDQTGGFLGEKTEQAKQKAAETAGAAKQKTAETAQYTKDSAIAGKDKTGSVLQQASEQVKSTVVGAKDAVMSTLGMTEDKAGTDDGANKDTSATAAATETTARDH

SEQ ID NO: 3654 - protein, 65 aa, Oryza sativa
  subsp. japonica
MSDKCGNCDCADKSQCVKKGTSYGVVIVDAEKSHFEMAEEVGYEENDGKCKCTTGCSCAGCNCGK

SEQ ID NO: 3655 - protein, 216 aa, Phaseolus vulgaris
MGQKINPLGFRLGTTQSHDSIWFAQPTKYSENIQEDKKIRDWIKNYIQKNIRISSGVEGIGEIKIQKRIDLIQVIIYMGFPKLLIEGKPHKIEEFQTNMHKKLNCVNKKLNIAIVKITNAYKHPNILAEFIAGQLKNRVSFRKAMKKAIELTEQAGTKGVQVQIAGRIDGKEIARVEWIREGRVPLQTIRAKIEYCCYTVRTIYGILGIKVWIFSK

SEQ ID NO: 3656 - protein, 53 aa, Phaseolus vulgaris
MAVPKKRTSISKKIIRNTLWKKKGYFTALKAFSLAQSLFTGNSKSFFCNKYKR

SEQ ID NO: 3657 - protein, 90 aa, Phaseolus vulgaris
MVKNSFIPVLSQEKKGKNPGLVEFQIFQFTNRIRRLTSHFELHPKDYSSQTGLRKILGKRQRLLSYLSKKDGIQYKKLINQFDIRQSQIR

SEQ ID NO: 3658 - protein, 400 aa, Bos taurus
MLEAMAEPSPEDPPPTLKPETQPPEKRRRTIEDFNKFCSFVLAYAGYIPPSKEESDWPASGSSSPLRGESAADSDGWDSAPSDLRTIQTFVKKAKSSKRRAAQAGPTQPGPPRSTFPRLQAPDSATLLEKMKLKDSLFDIDGPKMASPLSPTSLTHASRPPAALTPVPLSQGDLSQPPRKKDRKNRKLGPGGATGFGVLRRPRPAPGDGEKRSRIKKSKKRKLKKAERGDRLPPPGPPRAPPSDTDSEEEEEEEEEEEEMAAMVGGEAPAPVLPTPEAPRPPATVHPEGAPPTDGESKEVGSTETSQDGDASSSEGEMRVMDEDIMVESGDDSWDLITCYCRKPFAGRPMIECSLCGTWIHLSCAKIKKTNVPDFFYCQKCKELRPEARRLGGPPKSGEP

SEQ ID NO: 3659 - protein, 96 aa, Lactobacillus reuteri
  strain DSM 20016
MASEKYYIYVLYCADNSFYCGFTNNVKRRFHTHQTYQGAKYTRVKKRHPLKLIYSEEFESKHDALSAEYYFKHQTRRQKEKFLLDHGVDLLKLRRN

SEQ ID NO: 3660 - protein, 65 aa, Lactobacillus reuteri
  strain DSM 20016
MPKMKSNRAAAKRFKRTANGGFKSGNSFTSHRFHGKTKKQRRQLRGLSMMDKTNVKRYKKLLPFK

SEQ ID NO: 3661 - protein, 39 aa, Lactobacillus reuteri
  strain DSM 20016
MKVRPSVKKMCEHCKIVKRNGRVMVICSANPKHKQRQGK

SEQ ID NO: 3662 - protein, 92 aa, Lactobacillus reuteri
  strain DSM 20016
MGRSLKKGPFADASLLKKVKEQEGSEKKTVIKTWSRRSTIFPSFIGYTFAVYDGRKHVPVYVQEDMVGHKLGEFVPTRTFHGHASDDKKTGK

SEQ ID NO: 3663 - protein, 116 aa, Bos taurus
MAAAAPGSGAAREEEGTGGDAATPQPPAPTSAPGARLSRLPLARVKALVKADPDVTLAGQEAIFILARAAELFVETIAKDAYCCAQQGKRKTLQRRDLDNAIEAVDEFAFLEGTLD

SEQ ID NO: 3664 - protein, 142 aa, Bos taurus
MSKNVVIAEQEKNNEHCPEDINDKLSESTDDDGEDTSDEDKEEDSNPNKDTHAPLELMTEFLRAEMGHDYHLAKKLCQMILIYEPENPEAKEFFSLIEEMLLMEKAQNLEEDDDESEEDNSESEGESTEDPSEESSDECEDG

SEQ ID NO: 3665 - protein, 90 aa, Ipomoea purpurea
MVKNLFISVISQEETKENRGSVEFQIFNFTNKIQRLTSHLKLHKKDYLSQKGLRKILGKRQRLLAYLSKKNKVRYKELIEKLDIRETKTH

SEQ ID NO: 3666 - protein, 569 aa, Solanum lycopersicum; identical to SEQ ID NO: 837

SEQ ID NO: 3667 - protein, 92 aa, Carica papaya
MIKNSFISFQEKKKENSGSVEFQVFSFTNKIRRLTSHLELHRKDYLSQRGLRKILGKRQRLLSYLSKKNRVRYKELINQLDIRESKKISFLN

SEQ ID NO: 3668 - protein, 121 aa, Lactobacillus reuteri
  strain JCM 1112
MAFDKDAIIASLKEASISDLNDLVKAIEEEFDVSAAAPVAVAGAAGGDAAAKDSFTVELTEPGSAKVKVIKAVKDITGLGLKDAKDLVDGAPSAIKEDVKEDEANDIKEKLEAAGATVTLK

SEQ ID NO: 3669 - protein, 70 aa, Lactobacillus reuteri
  strain JCM 1112
MTFKVYYQADKTKRPVRENTQSLYIEADSEAEALLMVEHNTDYNIEFVEQLDEKALAYEKQNPNFKLTTF

SEQ ID NO: 3670 - protein, 89 aa, Lactobacillus reuteri
  strain JCM 1112
MAKKSKIAKLHHQEALVKKYAEKRKELKAKGDYIGLSKLPRNSSAVRLHNRDRYDGRPHAYMRKFGMSRIKFRELAHKGQIPGVRKASW

SEQ ID NO: 3671 - protein, 123 aa, Lactobacillus reuteri
  strain JCM 1112
MVVNIYDTANELSRQLRETQEYQGLQKAFEALKADGDTFDTFKKFQQAQADAQHKQMTGQQPTDDEIKNIQNLAKEVSGKKVVQDLMNQERQVDSMLQQLNKTITSPIQDLYSEVMPKMPGQE

SEQ ID NO: 3672 - protein, 66 aa, Welwitschia mirabilis
MPAKTGPRVVVFLECFHCTQKGAQKKFPGVFRYITKKNRHNKSTPLELKKFCPFCLKHTIHKERKK

SEQ ID NO: 3673 - protein, 73 aa, Welwitschia mirabilis
MTNMTNQISNNTGSVQSQVRFLTDRIQKLSRHLGTHKKDFSCQRSIRKLLIKRKRLLLYLYKKDKTGYNQVKS

SEQ ID NO: 3674 - protein, 111 aa, Bifidobacterium longum
  strain DJO10A
MAAKIKSGDLVKVIRGKDRGKEGTVKQVLSNDRLIVEGVQIVKKHVRATQQGQQAGIVSTEAPIHRSNVMVIDPETKQPTRVGITVKEEARDGKVKTVRVRVAKKSGKELA

SEQ ID NO: 3675 - protein, 64 aa, Bifidobacterium longum
  strain DJO10A
MPKMKTNSAASKRAKITGTGKVKHVGSAMRHNLEHKSARKRRELSADDVLRGGQAKKLHQLLQK

SEQ ID NO: 3676 - protein, 67 aa, Bifidobacterium longum
  strain DJO10A
MPQQFEQPQAQQAATQEDDALATTQAAAQTESADQADVLDDILDDIESTLETNAEEYVNSFVQKGGE

SEQ ID NO: 3677 - protein, 87 aa, Bifidobacterium longum
  strain DJO10A
MKTFESLFAELSEKAQTRPEGSLTVDELDKGTHFIGKKIIEEAGETWMAAEYEGADRTAEEMSQLLYHVQVMMIKHGLTLEDVYKHL

SEQ ID NO: 3678 - protein, 86 aa, Bifidobacterium longum
  strain DJO10A
MANIKSQKKRVLTNEKAHLRNVAVKSGLKTAIRATREAIAAGDKAAAEAAYKVAAQKLDKAAGAGVIHKNQAANRKSGLAVAINAL

SEQ ID NO: 3679 - protein, 106 aa, Saccharomyces cerevisiae
  strain RM11-1a
MSKLGPLARSVKWTLSVGVIGSVFYLYRYSNNGYFYDHDATWLKQDHQVQDLVDRKEVVPGETRNRKLVVTDDGTAWSRTMGESIKDIWNEQIRNSVDWIYSWGKN

SEQ ID NO: 3680 - protein, 99 aa, Lactobacillus casei
  strain BL23
MGNMQGMMKQMQKMQKEMQAAQRELYATEFEGKSASDMVTVKFTGEKIMKDIQIKPEAIDPDDPDMLQDLIIEAVNQAMGTIDKETQDKMGKYTRGLPM

SEQ ID NO: 3681 - protein, 114 aa, Lactobacillus casei
  strain BL23
MANVYDTANQMAADIKTTQEFQDLKKAFDLLKLDTVAYGLFQQFQQKQYEMQQKSMQGQDFTDDEVKSLQELGDKMRDIQPIQNLMAKEQGLSQMMDELNKIISQPIIDVYQGK

SEQ ID NO: 3682 - protein, 86 aa, Bifidobacterium longum
  subsp. infantis
  strain ATCC 15697 / DSM 20088 / JCM 1222 / NCTC 11817 / S12
MANIKSQKKRVLTNEKAHLRNVAVKSGLKTAIRATREAIAAGDKAAAEAAYKVAAQKLDKAAGAGVIHRNQAANRKSGLAVAINAL

SEQ ID NO: 3683 - protein, 67 aa, Bifidobacterium longum
  subsp. infantis
  strain ATCC 15697 / DSM 20088 / JCM 1222 / NCTC 11817 / S12
MPQQFEQPQAQQAVTQEDDALATTQAATQTESTDQADVLDDILDDIESTLETNAEEYVNSFVQKGGE

SEQ ID NO: 3684 - protein, 98 aa, Bifidobacterium animalis
  subsp. lactis
  strain AD011
MPTFTREEIVHLGDLARIALTDEEITRMQSELNVIADAIDSVQEVATADVEPTANPVPLEAYLRPDVPATPLTQAEALSGAPVAEDGMFVAPRILGEE

SEQ ID NO: 3685 - protein, 63 aa, Bifidobacterium animalis
  subsp. lactis
  strain AD011
MPKMKTKTAAAKRVRLTATGKVMHAGSGMRHNLEHKSARKRRALKRDDVLQTAQAKKMKGLLG

SEQ ID NO: 3686 - protein, 86 aa, Bifidobacterium animalis
  subsp. lactis
  strain AD011
MANIKSQKKRVRTNEKAHQRNVAVKSALKTYIRRTREAIASGDKAAAEAAFAIAGRKLDQAAGKGVIAKNQAANRKSSLALQINAM

SEQ ID NO: 3687 - protein, 44 aa, Bifidobacterium animalis
  subsp. lactis
  strain AD011
MKRTFQPNNRRRHMKSGFRVRMRTRAGRALINRRRAKGRKSLSA

SEQ ID NO: 3688 - protein, 111 aa, Bifidobacterium animalis
  subsp. lactis
  strain AD011
MVAKIKSGDLVKVIRGKDRGKEGTVKRVLKDDRLIVEGVQIVKKHVRATQQGQQAGIVSVEAPIHRSNVMVIDPETKQPTRVGVVIKEEARDGKVKTVRVRVAKKSGKELA

SEQ ID NO: 3689 - protein, 538 aa, Bacillus megaterium; identical to SEQ ID NO: 665
  strain DSM 319

SEQ ID NO: 3690 - protein, 291 aa, Bacillus amyloliquefaciens; identical to SEQ ID NO: 662
  strain ATCC 23350 / DSM 7 / BCRC 11601 / NBRC 15535 / NRRL B-14393

SEQ ID NO: 3691 - protein, 256 aa, Bacillus amyloliquefaciens; identical to SEQ ID NO: 668
  strain ATCC 23350 / DSM 7 / BCRC 11601 / NBRC 15535 / NRRL B-14393

SEQ ID NO: 3692 - protein, 265 aa, Bacillus amyloliquefaciens; identical to SEQ ID NO: 656
  strain ATCC 23350 / DSM 7 / BCRC 11601 / NBRC 15535 / NRRL B-14393

SEQ ID NO: 3693 - protein, 550 aa, Saccharomyces cerevisiae; identical to SEQ ID NO: 820
  strain FostersB
  MOD_RES (455)..(455): Any amino acid

SEQ ID NO: 3694 - protein, 894 aa, Glycine max; identical to SEQ ID NO: 801

SEQ ID NO: 3695 - protein, 284 aa, Arthrospira platensis C1; identical to SEQ ID NO: 607

SEQ ID NO: 3696 - protein, 267 aa, Glycine max; identical to SEQ ID NO: 830

SEQ ID NO: 3697 - protein, 125 aa, Saccharomyces cerevisiae
  strain ATCC 204508 / S288c
MEKDEEDEESEEAEEELLVLESDEKLNDVNDMEAMLVDELVCDTRDLLDVDEVREDESALEEETILDDKMELEELTLLTEERAVDTAEEFEDDDCTKNCARIVDMHDSIKSNKRKLFLVVKDNIL

SEQ ID NO: 3698 - protein, 25 aa, Glycine max
MGGVGKTKRMRRLKRKRRKMRQRSK

SEQ ID NO: 3699 - protein, 91 aa, Bos taurus
MGLEDEQRMLTGSGDPKEEEEEEEELVDPLTTVREQCEQLEKCVKARERLELCDERVSSRSQTEEDCTEELLDFLHARDHCVAHKLFNSLK

SEQ ID NO: 3700 - protein, 96 aa, Brassica napus
ATYKVKFITPEGEQEVECDDDVYVLDAAEEAGIDLPYSCRAGSCSSCAGKVVSGFVDQSDESFLDDDQIAEGFVLTCAAYPTSDVTIETHKEEELV

SEQ ID NO: 3701 - protein, 49 aa, Bos taurus
GQFLEDPSVLTKEKLKSELVANNVTLPAGEQRKDVYVELYLQHLTALKR

SEQ ID NO: 3702 - protein, 49 aa, Bos taurus
PEFLEDPSVLTKEKLKSELVANNVTLPAGEQRKDVYVELYLQSLTALKR

SEQ ID NO: 3703 - protein, 49 aa, Bos taurus
PEFLEDPSVLTKEKLKSELVANNVTLPAGEQRKEVYVELYLQHLTALKR

SEQ ID NO: 3704 - protein, 51 aa, Bos taurus
MARYRCCLTHSGSRCRRRRRRRCRRRRRRFGRRRRRRVCCRRYTVIRCTRQ

SEQ ID NO: 3705 - protein, 106 aa, Saccharomyces cerevisiae
  strain ATCC 204508 / S288c
MVNVPKTRKTYCKGKTCRKHTQHKVTQYKAGKASLFAQGKRRYDRKQSGFGGQTKPVFHKKAKTTKKVVLRLECVKCKTRAQLTLKRCKHFELGGEKKQKGQALQF

SEQ ID NO: 3706 - protein, 79 aa, Bos taurus
MSAKKSPEELKGIFEKYAAKEGDPNQLSKEELKLLLQTEFPSLLKGPSTLDELFEELDKNGDGEVSFEEFQVLVKKISQ

SEQ ID NO: 3707 - protein, 88 aa, Bos taurus
ESSFPATFVPLPADSEGGEDEDLQCVCLKTTSGINPRHISSLEVIGAGTHCPSPQLLATKKTGRKICLDQQRPLYKKILKKLLDGDES

SEQ ID NO: 3708 - protein, 149 aa, Triticum aestivum
MADQLTDEQIAEFKEAFSLFDKDGDGCITTKELGTVMRSLGQNPTEAELQDMINEVDADGNGTIDFPEFLNLMARKMKDTDSEEELKEAFRVFDKDQDGFISAAELRHVMTNLGEKLTDEEVDEMIREADVDGDGQINYEEFVKVMMAK

SEQ ID NO: 3709 - protein, 93 aa, Triticum aestivum
MASGQQERSQLDRKAREGETVVPGGTGGKSLEAQENLAEGRSRGGQTRREQMGEEGYSQMGRKGGLSTNDESGGDRAAREGIDIDESKFKTKS

SEQ ID NO: 3710 - protein, 51 aa, Saccharomyces cerevisiae
  strain ATCC 204508 / S288c
MAAQKSFRIKQKMAKAKKQNRPLPQWIRLRTNNTIRYNAKRRNWRRTKMNI

SEQ ID NO: 3711 - protein, 59 aa, Saccharomyces cerevisiae
  strain ATCC 204508 / S288c
MAKSKNHTAHNQTRKAHRNGIKKPKTYKYPSLKGVDPKFRRNHKHALHGTAKALAAAKK

SEQ ID NO: 3712 - protein, 161 aa, Coturnix japonica
MDDIYKAAVEQLTEEQKNEFKAAFDIFVLGAEDGCISTKELGKVMRMLGQNPTPEELQEMIDEVDEDGSGTVDFDQFLVMMVRCMKDDSKGKTEEELSDLFRMFDKNADGYIDLEELKIMLQATGETITEDDIEELMKDGNKNNDGRIDYDEFLQFMKGVE

SEQ ID NO: 3713 - protein, 177 aa, Saccharomyces cerevisiae
  strain ATCC 204508 / S288c
MTSNSDGSSTSPVEKPITGDVETNEPTKPIRRLSTPSPEQDQEGDFDEEDDDDKFSVSTSTPTPTITKTKDSSDTSTVTRRKQPIRYIENKTRRHVTFSKRRHGIMKKAYELSVLTGANILLLILANSGLVYTFTTPKLEPVVREDEGKSLIRACINASDTPDATDTSPAQEQSPAN

SEQ ID NO: 3714 - protein, 559 aa, Saccharomyces cerevisiae
  strain ATCC 204508 / S288c
MMEEFSYDHDFNTHFATDLDYLQHDQQQQQQQQHDQQHNQQQQPQPQPIQTQNLEHDHDQHTNDMSASSNASDSGPQRPKRTRAKGEALDVLKRKFEINPTPSLVERKKISDLIGMPEKNVRIWFQNRRAKLRKKQHGSNKDTIPSSQSRDIANDYDRGSTDNNLVTTTSTSSIFHDEDLTFFDRIPLNSNNNYYFFDICSITVGSWNRMKSGALQRRNFQSIKELRNLSPIKINNIMSNATDLMVLISKKNSEINYFFSAMANNTKILFRIFFPLSSVTNCSLTLETDDDIINSNNTSDKNNSNTNNDDDNDDNSNEDNDNSSEDKRNAKDNFGELKLTVTRSPTFAVYFLNNAPDEDPNLNNQWSICDDFSEGRQVNDAFVGGSNIPHTLKGLQKSLRFMNSLILDYKSSNEILPTINTAIPTAAVPQQNIAPPFLNTNSSATDSNPNTNLEDSLFFDHDLLSSSITNTNNGQGSNNGRQASKDDTLNLLDTTVNSNNNHNANNEENHLAQEHLSNDADIVANPNDHLLSLPTDSELPNTPDFLKNTNELTDEHRWI

SEQ ID NO: 3715 - protein, 165 aa, Gossypium hirsutum
MQSMKDAAASAKAGMEKAKASMQEKVDQMKTRDPNEKEMARERKEERQEDAELRKQEARHHNATAGHVGGGGIGGTGYTTAGYNIGDTGGYGGTGGHDNRGYPTAGSGYDTGRQDDLSSMGFGGDTEGAYGTTGNQDFPNAASNNAGTRRNTRGGTQDDPYYRSY

SEQ ID NO: 3716 - protein, 49 aa, Capra hircus
YLDPGLGAPAPYPDPLEPKREVCELNPDCDELADHIGFQEAYRRFYGIA

SEQ ID NO: 3717 - protein, 200 aa, Oryza sativa
  subsp. japonica
MASHQDQASYRAGETKAHTEEKAGQVMGASKDKASEAKDRASEAAGHAAGKGQDTKEATKEKAQAAKERASETAQAAKDKTSSTSQAARDKAAESKDQTGGFLGEKTEQAKQKAAETAGAAKQKTAETAQYTKDSAIAGKDKTGSVLQQASEQVKSTVVGAKDAVMSTLGMTEDEAGTDDGANKDTSATAAATETTARDH

SEQ ID NO: 3718 - protein, 33 aa, Saccharomyces cerevisiae
  strain ATCC 204508 / S288c
MATKGNLKRQTKYFSTIAYTETRGEATLRANYQ

SEQ ID NO: 3719 - protein, 46 aa, Saccharomyces cerevisiae
  strain ATCC 204508 / S288c
MRSHFDTEYLGDLARKFKCTISWNYDIRFIVQYKVQRVILITHLNV

SEQ ID NO: 3720 - protein, 67 aa, Bifidobacterium longum
MPQQFEQPQAQQAATQEDDALATTQAAAQTESTDQADVLDDILDDIESALETNAEEYVNSFVQKGGE

SEQ ID NO: 3721 - protein, 833 aa, Saccharomyces cerevisiae
  strain ATCC 204508 / S288c
MNNAANTGTTNESNVSDAPRIEPLPSLNDDDIEKILQPNDIFTTDRTDASTTSSTAIEDIINPSLDPQSAASPVPSSSFFHDSRKPSTSTHLVRRGTPLGIYQTNLYGHNSRENTNPNSTLLSSKLLAHPPVPYGQNPDLLQHAVYRAQPSSGTTNAQPRQTTRRYQSHKSRPAFVNKLWSMLNDDSNTKLIQWAEDGKSFIVTNREEFVHQILPKYFKHSNFASFVRQLNMYGWHKVQDVKSGSIQSSSDDKWQFENENFIRGREDLLEKIIRQKGSSNNHNSPSGNGNPANGSNIPLDNAAGSNNSNNNISSSNSFFNNGHLLQGKTLRLMNEANLGDKNDVTAILGELEQIKYNQIAISKDLLRINKDNELLWQENMMARERHRTQQQALEKMFRFLTSIVPHLDPKMIMDGLGDPKVNNEKLNSANNIGLNRDNTGTIDELKSNDSFINDDRNSFTNATTNARNNMSPNNDDNSIDTASTNTTNRKKNIDENIKNNNDIINDIIFNTNLANNLSNYNSNNNAGSPIRPYKQRYLLKNRANSSTSSENPSLTPFDIESNNDRKISEIPFDDEEEEETDFRPFTSRDPNNQTSENTFDPNRFTMLSDDDLKKDSHTNDNKHNESDLFWDNVHRNIDEQDARLQNLENMVHILSPGYPNKSFNNKTSSTNTNSNMESAVNVNSPGFNLQDYLTGESNSPNSVHSVPSNGSGSTPLPMPNDNDTEHASTSVNQGENGSGLTPFLTVDDHTLNDNNTSEGSTRVSPDIKFSATENTKVSDNLPSFNDHSYSTQADTAPENAKKRFVEEIPEPAIVEIQDPTEYNDHRLPKRAKK

SEQ ID NO: 3722 - protein, 37 aa, Spinacia oleracea
MKIRASVRPICEKCRLIRRRGRIIVICSNPKHKQRQG

SEQ ID NO: 3723 - protein, 731 aa, Saccharomyces cerevisiae
  strain ATCC 204508 / S288c
MDKLVVNYYEYKHPIINKDLAIGAHGGKKFPTLGAWYDVINEYEFQTRCPIILKNSHRNKHFTFACHLKNCPFKVLLSYAGNAASSETSSPSANNNTNPPGTPDHIHHHSNNMNNEDNDNNNGSNNKVSNDSKLDFVTDDLEYHLANTHPDDTNDKVESRSNEVNGNNDDDADANNIFKQQGVTIKNDTEDDSINKASIDRGLDDESGPTHGNDSGNHRHNEEDDVHTQMTKNYSDVVNDEDINVAIANAVANVDSQSNNKHDGKDDDATNNNDGQDNNTNNDHNNNSNINNNNVGSHGISSHSPSSIRDTSMNLDVFNSATDDIPGPFVVTKIEPYHSHPLEDNLSLGKFILTKIPKILQNDLKFDQILESSYNNSNHTVSKFKVSHYVEESGLLDILMQRYGLTAEDFEKRLLSQIARRITTYKARFVLKKKKMGEYNDLQPSSSSNNNNNNDGELSGTNLRSNSIDYAKHQEISSAGTSSNTTKNVNNNKNDSNDDNNGNNNNDASNLMESVLDKTSSHRYQPKKMPSVNKWSKPDQITHSDVSMVGLDESNDGGNENVHPTLAEVDAQEARETAQLAIDKINSYKRSIDDKNGDGHNNSSRNVVDENLINDMDSEDAHKSKRQHLSDITLEERNEDDKLPHEVAEQLRLLSSHLKEVENLHQNNDDDVDDVMVDVDVESQYNKNTTHHNNHHSQPHHDEEDVAGLIGKADDEEDLSDENIQPELRGQ

SEQ ID NO: 3724 - protein, 124 aa, Saccharomyces cerevisiae
  strain ATCC 204508 / S288c
MIRRAPTTLQLSHDDVTSLIDDLNEQKLKQQLNIEKTKYFQGKNGGSLHSNTDFQDTSQNIEDNNNDNDNDIDEDDDMSSYNDKAASVAHTRVLNSLHLSTDSNTAHETSNANDNHNPFYIREE

SEQ ID NO: 3725 - protein, 98 aa, Raphanus sativus
SAVYKVKLIGPDGQENEFDVPDDQYILDAAEEAGVDLPYSCRAGACSTCAGKIEKGQVDQSDGSFLEDHHFEKGYVLTCVAYPQSDLVIHTHKEEELF

SEQ ID NO: 3726 - protein, 98 aa, Raphanus sativus
SAVYKVKLIGPEGEENEFEVQDDQFILDAAEEAGVDLPYSCRAGACSTCAGQIVKGQVDQSEGSFLEDDHFEKGFVLTCVAYPQSDCVIHTHKETELF

SEQ ID NO: 3727 - protein, 50 aa, Equus caballus
MARYRCCRSQSQSRCRRRRRRRCRRRRRRSVRQRRVCCRRYTVLRCRRRR

SEQ ID NO: 3728 - protein, 92 aa, Daucus carota
MASQQEKKELDARARQGETVVPGGTGGKSLEAQQHLAEGRSKGGQTRKEQLGGEGYHEMGRKGGLSNNDMSGGERAEQEGIDIDESKFRTKK

SEQ ID NO: 3729 - protein, 166 aa, Sus scrofa
MSYTTYFLAFQLCVTLCFSGSYCQAPFFKEITILKDYFNASTSDVPNGGPLFLEILKNWKEESDKKIIQSQIVSFYFKFFEIFKDNQAIQRSMDVIKQDMFQRFLNGSSGKLNDFEKLIKIPVDNLQIQRKAISELIKVMNDLSPRSNLRKRKRSQTMFQGQRASK

SEQ ID NO: 3730 - protein, 269 aa, Rhizomucor miehei; identical to SEQ ID NO: 428

SEQ ID NO: 3731 - protein, 92 aa, Sus scrofa
MVRCRVRSPSESPQQGSGQQRENERQDQDQELRPEDVPVYGRTHRGRYHYRHRSHTRRRRSCRRRRRRACRHRRHRRGCRRIRRRRRCRRRL

SEQ ID NO: 3732 - protein, 115 aa, Bos taurus
MVRCHVKSPTESPPGQQGSGQQGETEHPDQARELRPEDIPVYGRTHRGRYHYRHRSHTRRRPYRRRRRRACRHRRRRRGAAGPPCAPIPGTPQASRQGSGCRRMRRRRRRCGRQL

SEQ ID NO: 3733 - protein, 97 aa, Daucus carota
AEVKLGADDGALVFSPSSFSVAKGEGISFKNNAGFPHNIVFDEDEVPAGVDVSKISQEDYLDGAGESFTVTLTEKGTYKFYCEPHAGAGMKGEVTVT

SEQ ID NO: 3734 - protein, 54 aa, Ovis aries
STSRKLKSQGTRRGKNRTPHKGVKRGCSKRKYRKSSLKSRKRCDDANRNFRSHL

SEQ ID NO: 3735 - protein, 94 aa, Triticum aestivum
MASGQEKGRSELDSLAREGQTVVPGGTGGKSYEAQEKLAEGRSRGGQTRKEQMGEEGYSEMGRKGGLSTNDESGGERAAREGIDIDESKFKTKS

SEQ ID NO: 3736 - protein, 42 aa, Oncorhynchus mykiss
MSDKPNLEEVASFDKTKLKKTETQEKNPLPTKETIEQEKQAS

SEQ ID NO: 3737 - protein, 132 aa, Bos taurus
MDTKTQSLPNTHAQPHSNSRPQSHACHHCSCSQHCQSRSRSRSCRSRSSSRRPRSHRSPTGRQGQSPGPSPPLRRHRHTMHSHQCPSRPVTHSCSHSKNRKNLEGKVIKRKQVKRSKQVYKRKRQSSGRKYN

SEQ ID NO: 3738 - protein, 214 aa, Octopus vulgaris
MPSYTLHYFNHRGRARSAVCCSQLLVSSTMTADRVFRMGQHEKQDAMSHDANVGIGQQNPNSPEYAMARYLAREFGFHGRNNMEMARVDFISDCFYDILDDYMRMYQDGNCRMMFQRSRDMSSSSEKRMRFQETCRRILPFMERTLEMYNGGSQYFMGDQMTMADMMCYCALENPLMEEPSMLSSYPKLMALRNRVMNHSKMSSYLQRRCRTDF

SEQ ID NO: 3739 - protein, 119 aa, Gallus gallus
MSKGCQTQGPLSELEKAIDVIIDVFHQYSRREGDKDTLTRKELKLLIEKQLANYLKHVKNQVSIDQIFKDLDNNKDQQLSFGEVMLLIIRVTVATHEHLHFCEDHQQQHQHQHQHQHNH

SEQ ID NO: 3740 - protein, 57 aa, Spinacia oleracea
MAVPKKRTSIYKKRIRKNIWKKKGYWAALKAFSLAKSLSTGNSKSFFVRKISNQTLE

SEQ ID NO: 3741 - protein, 148 aa, Gallus gallus
MATSDIQVKELEKRASGQAFELILGPRSKEAAPEFPLSPPKKKDLSLEEIQKKLEAAEERRKSHEAEVLKQLAEKREHEKEVLQKAIEENNNFSKMAEEKLTHKMEANKENREAQMAAKLERLREKDKHIEEVRKNKEGKDPGEAETN

SEQ ID NO: 3742 - protein, 672 aa, Saccharomyces cerevisiae
  strain ATCC 204508 / S288c
MKQEQSHEGDSYSTEFINLFGKDTATHPSSNNGANNNGMGSTNSLDQFVATASSSSSLVTSSENRRPLIGDVTNRGNTNLYDHAVTPEILLEQLAYVDNFIPSLDNEFSNVDWNVNTTHNNANNNGADTFSSINANPFDLDEQLAIELSAFADDSFIFPDEDKPSNNNNNSNNGNDDHSNHDVLHEDPSTNNRQRNPHFLTQRRNTFLTSQYDQSKSRFSSKNKRNGNNGETNNFGDNMQNNHPFEPNFMGSPSQFPADATNMTSIDHGGFTNVDITSTENNTTGDNGVDALSNLLHRTTHTPNRSSPLSNVTSAQNSSSQQRKHSESKVDSNSDNNSSNKAPNITVPDYSIIPTSVLVTLLPRVNVPNGAYNSLISAGFDNDQIDAIAAIMAYHHQKKIRENNSNNNKNINTNDSQEAPILKNINELLSVLIPPSPAETRGPTTLSTSPSFNEHGVVAEASFLSSILELGIKHPKSNNIHNQRQPSRNDHKISRESDGNNGNDNVHHNNAVIKSSTTRGDEIAKIRSEPTLNASSSDHKENSLKRSHSGDLKNKKVPVDRKYSDNEDDEYDDADLHGFEKKQLIKKELGDDDEDLLIQSKKSHQKKKLKEKELESSIHELTEIAASLQKRIHTLETENKLLKNLVLSSGETEGIKKAESLKKQIFEKVQKE

SEQ ID NO: 3743 - protein, 94 aa, Saccharomyces cerevisiae
  strain ATCC 204508 / S288c
MDRSLQVYICMYPYLDGSKQYRFDELISFYRPCPKSLDNIKSHYRQIHHQIRRRTHQHHQIRRRTHQHHHRSNCSRQRQCLVRHSCGRQMRVLA

SEQ ID NO: 3744 - protein, 114 aa, Solanum lycopersicum
MAEEKHQHHHHLFHHKNKEDEGGPVDYEKEVKHHSHLEKIGELGAVAAGALALHEKHKAKKDPEHAHKHKIEEEIMAVAAVGAGGFAFHEHHQKKDAKKEKKEVEGGHHHHHHY

SEQ ID NO: 3745 - protein, 108 aa, Solanum lycopersicum
MAEEKQHHRLFHHKNREEEGGPVDHKKKVKHHSHLQKIGELGAVAAGAYALHEKHKAKKDPENAHKHKIKQEIAAVAAVGAGGFAFHEHHQKKEAKKEKKAAEKGRHH

SEQ ID NO: 3746 - protein, 366 aa, Saccharomyces cerevisiae
  strain ATCC 204508 / S288c
MNYMAYDYDPQHSLETSFNNLAFHPHQQSQQQALYESGERNDARPGLMNTLGQASKMNNSMLPQGSSASPLTGQHSLNSTTNFNMPPSMNTYNYQNVPQASMRNTLNHNNIMNGATANDYWLDPMNNMTNNKDTNGNPNDSMSSMSNMTAKTSINSTAFKNSFVPFNHVTALSMNNVNSNEMNSNKDDRMEALEVELQIKESQIESLENEIQRLKKIFNEGLNYKQNEHKYEKENCHIPQTFELPASLEVIFRKLSSSLHAKEKELAETKENLESILTALALNPTNSVTKYGRYDAESIAHKMVVRLENLTNENKEMAKMLAYGRSKETQIELQLAKKENLELREKIASLEAHLASKESSKEDVAN

SEQ ID NO: 3747 - protein, 211 aa, Saccharomyces cerevisiae
  strain ATCC 204508 / S288c
MLRRSKNSSTNTNADTKKRQSMHLGSKSSLISLTSEFGHGHSKTKQKKEEGTAPSQFLSPTNKRSTSSQSKLKRSSLLLDETLLKDYHSAMRHMQTNAAKEEKLRMAPSPTQSTRSESDASLSSTKSSISSIFSQDNDYSIHDLLYEDIEEMDKTDAFKINNTIAIDDSKALFVFCSNDSSSRTASIETLHESNLDNLDMGSSRRTSLDFF

SEQ ID NO: 3748 - protein, 255 aa, Saccharomyces cerevisiae
  strain ATCC 204508 / S288c
MGKFEQKERERISTFSFPTTGSQSSTSIKSLGSPLYGRFSSLSSTESQFDSSKQPHEYEKSFYFEESQGEALFNKLKTYSFPGDKDGVKTRRNSSICPRKPNAVSPLRVESNELSSHSHSRSLSHELTKPSGRRKSYHRKSHAISFSRSCKPNFIDGYDSNSSIGVNSRKTSLASSFLDKEYHSSPDTSYTHQMSPKNTIMNTNEQLRRNASGRFGSLKEFAEKNQINIEGKIFAHKVETGDILQPLIDLDIDNK

SEQ ID NO: 3749 - protein, 74 aa, Saccharomyces cerevisiae
  strain ATCC 204508 / S288c
MNKYLFDHKIWSTPYYFYCEEDCHRLFLSFIEGRTFEKPTSNAEENVQETEAGESFTLNPGEDFQNCFPRQRIL

SEQ ID NO: 3750 - protein, 112 aa, Saccharomyces cerevisiae
  strain ATCC 204508 / S288c
MDLRSALEKTNIIKSYKLHFLIRYTTSRFEVKEPFLAYLHMARQKDKLLPKCITPPNKKADPFTNDVSSYFTHTHTHTPCSPSLVYTYVNTTEKSPSKSPKHKNILPFNFTK

SEQ ID NO: 3751 - protein, 70 aa, Pinus thunbergii
MAVPKKRTSRSKKKIRKNVRKGKAYRAAIKAFSLAKSISTGHSKSFYCIVNDDSSGSSESKLTAIDLDDP

SEQ ID NO: 3752 - protein, 93 aa, Triticum aestivum
MASGQQERSELDRMAREGETVVPGGTGGKSLEAQEHLADGRSRGGETRKEQLGEEGYREMGRKGGLSTMEESGGERAAREGIEIDESKFKTKS

SEQ ID NO: 3753 - protein, 151 aa, Pisum sativum
MGRLHSKGKGISSSALPYRRTAPSWLKISSQDVDETICKFAKKGLTPSQIGVILRDSHGIAQVKSVTGSKILRILKAHGLAPEIPEDLYHLIKKAVSIRKHLERFRKDKDSKFRLILVESRIHRLARYYKKTKKLPPVWKYESTTASTLVA

SEQ ID NO: 3754 - protein, 91 aa, Zea mays
MASGQESRKELDRKAREGETVVPGGTGGKSVEAQEHLAEGRSRGGQTRREQLGQQGYSEMGKKGGLSTTDESGGERAAREGVTIDESKFTK

SEQ ID NO: 3755 - protein, 95 aa, Oryza sativa
  subsp. japonica
MASGQQQQGRSELDRMAREGQTVVPGGTGGKSLEAQENLAEGRSRGGQTRKEQMGEEGYREMGRKGGLSTGDESGGERAAREGIDIDESKYKTKS

SEQ ID NO: 3756 - protein, 190 aa, Ovis aries
METQMASPSLGRCSLWLLLLGLLLPSASAQALSYREAVLRAVGQLNEKSSEVNLYRLLELDPPPKDAEDQGARKPVSFRVKETVCPRMSQQPPEQCDFKENGLVKQCVGTVSLDTSNDEFDLNCNELQSVRRLRPRRPRLPRPRPRPRPRPRSLPLPRPQPRRIPRPILLPWRPPRPIPRPQPQPIPRWL

SEQ ID NO: 3757 - protein, 51 aa, Oryza sativa
  subsp. japonica
MPSHKTFRIKKKLAKKMRQNRPIPYWIRMRTDNTIRYNAKRRHWRRTKLGF

SEQ ID NO: 3758 - protein, 417 aa, Bos taurus; identical to SEQ ID NO: 107

SEQ ID NO: 3759 - protein, 116 aa, Saccharomyces cerevisiae
  strain ATCC 204508 / S288c
MLLTPAKTTRTEDSANSTDDSSKSSNSFMRAIVSSLMVKPITSLTNTVTCRQSSHHNSSPSKITRYDLIKAAAENDLKRSKSQGREKSRRNSNRRNNEEIFVANTASEIQRTKSSI

SEQ ID NO: 3760 - protein, 386 aa, Saccharomyces cerevisiae; identical to SEQ ID NO: 850
  strain ATCC 204508 / S288c

SEQ ID NO: 3761 - protein, 86 aa, Saccharomyces cerevisiae
  strain ATCC 204508 / S288c
MPPRSIEEWFYYKLLSSPGFHRFVRKVYRKVNGIKEDPFTDQSTAFQYLYKPTPRQKFKALRLLFWDEMRSTFGFRRRLGDRFKKD

SEQ ID NO: 3762 - protein, 79 aa, Lactobacillus johnsonii
MFVKTGDKVKVIAGKDKGKEGTVLSVNAKTNRIVVKGVNKIKKHEKPSQTNANGGVVEKEGSIHASNVKVIAKKEDNNK

SEQ ID NO: 3763 - protein, 149 aa, Anas platyrhynchos [sequence omitted]

SEQ ID NO: 3764 - protein, 44 aa, Bos taurus
MSDKPDMAEIEKFDKSKLKKTETQEKNPLPSKETIEQEKQAGES

SEQ ID NO: 3765 - protein, 71 aa, Bos taurus
MASNNTASIAQARKLVEQLKMEANIDRIKVSKAAADLMAYCEAHAKEDPLLTPVPASENPFREKKFFCAIL

SEQ ID NO: 3766 - protein, 44 aa, Equus caballus
MADKPDMGEIASFDKAKLKKTETQEKNTLPTKETIEQEKRSEIS

SEQ ID NO: 3767 - protein, 51 aa, Capra hircus
MARYRCCLTHSRSRCRRRRRRRCRRRRRRFGRRRRRRVCCRRYTVVRCTRQ

SEQ ID NO: 3768 - protein, 616 aa, Aspergillus niger; identical to SEQ ID NO: 363

SEQ ID NO: 3769 - protein, 92 aa, Bos taurus
MTKLEDHLEGIINIFHQYSVRVGHFDTLNKRELKQLITKELPKTLQNTKDQPTIDKIFQDLDADKDGAVSFEEFVVLVSRVLKTAHIDIHKE

SEQ ID NO: 3770 - protein, 68 aa, Saccharomyces cerevisiae
  strain ATCC 204508 / S288c
MGAAYHFMGKAIPPHQLAIGTLGLLGLLVVPNPFKSAKPKTVDIKTDNKDEEKFIENYLKKHSEKQDA

SEQ ID NO: 3771 - protein, 49 aa, Equus caballus
YLDHWLGAPAPYPDPLEPRREVCELNPDCDELADHIGFQEAYRRFYGPV

SEQ ID NO: 3772 - protein, 49 aa, Bison priscus
YLDHGLGAPAPYPDPLEPKREVCELNPDCDELADHIGFQEAYRRFYGPV

SEQ ID NO: 3773 - protein, 76 aa, Equus caballus
QAEESCLQNLASRYLQTVTDYGKDLVEKALAPELQAQAKAYFEKTQEQLTPLVKKIGNDLLNFFSHFIELKTQPAT

SEQ ID NO: 3774 - protein, 134 aa, Bos taurus
MDFVMKQALGGATKDMGKMLGGEEEKDPDAQKKEEERQEALRQQEEERKAKHARMEAEREKVRQQIRDKYGLKKKEEKEAEEKAALEQPCEGSLTRPKKAIPAGCGDEEEEEEESILDTVLKYLPGPLQDMFKK

SEQ ID NO: 3775 - protein, 49 aa, Lama guanicoe
YLDHGLGAPAPYVDPLEPKREVCELNPDCDELADQMGFQEAYRRFYGTT

SEQ ID NO: 3776 - protein, 291 aa, Bacillus subtilis; identical to SEQ ID NO: 405
  strain 168

SEQ ID NO: 3777 - protein, 88 aa, Solanum lycopersicum
MQTGKDAASAAKAGMEKTKANVQEKAERMTTRDPLKKEMATEKKEDRVAAAEMGKRDAKAQHAAEKQGAATTGTGTTGYGATGNHTTF

SEQ ID NO: 3778 - protein, 175 aa, Saccharomyces cerevisiae
  strain ATCC 204508 / S288c
MNESENSPQHNEVTVPMVEDTSSNADIPMEQIQREDNKNYDKHDNECFDMNGNHNNNSDNLQFDSVPSSATKDLKNIKSVTNQNVKIEESSSTNSVIEESSEPKISKLENVNLAATVGGSQTRKYLNTNVTPHLLAGMRLIAVQQPEDPLRVLGEYLIEQSNILKSGEKESNASK

SEQ ID NO: 3779 - protein, 46 aa, Lactobacillus casei
  strain ATCC 334
MTTKRTFQPKKRHRERVHGFMKRMSTKNGRKVLARRRAKGRKVLSA

SEQ ID NO: 3780 - protein, 89 aa, Lactobacillus casei
  strain ATCC 334
MAKKSKIAKAKRQEKLVQQYAVKRAALKAKGDYIGLSKLPRDSSPVRLHHRDVLDGRPHAYMRKFGMSRLNFRELAHKGQIPGVRKASW

SEQ ID NO: 3781 - protein, 49 aa, Lactobacillus casei
  strain ATCC 334
MTAKKVALACSVCGQRNYFVPENPKRTERLTLKKFCKHCGRVTVHQETK

SEQ ID NO: 3782 - protein, 114 aa, Lactobacillus casei
  strain ATCC 334
MANVYDTANQMAADIKTTQEFQDLKKAFDLLKLDTVAYGLFQQFQQKQYEMQQKSMQGQDFTDDEVKSLQELGDKMRGIQPIQNLMAKEQGLSQMMDELNKIISQPIIDVYQGK

SEQ ID NO: 3783 - protein, 66 aa, Lactobacillus casei
  strain ATCC 334
MPKFKTHRASAKRFKKTASGALKRGHAYTSHRFHGKTKKQRRQLRKSALVSHSDMKRIRQMLSQMK

SEQ ID NO: 3784 - protein, 113 aa, Lactobacillus casei
  strain ATCC 334
MEIEKNYRMNSLFEFYGPLLTDKQHAYLALYYGDDYSLGEIATEFNVSRQAVYDNIRRTEASLEEYEKKLHLFANYQAQNEAVDTLVSYARTHYPDDKALSTLLERVADQTAK

SEQ ID NO: 3785 - protein, 89 aa, Lactobacillus casei
  strain ATCC 334
MATKTYYFYVLLCADGSFYGGFTDDVKARVATHNAGKGAKYTAQRLPVRLLYHQAFADKHDALSAEWHFKHQTRHRKEVFLEDHQVEWR

SEQ ID NO: 3786 - protein, 80 aa, Lactobacillus casei
  strain ATCC 334
MHRTFYEYLMTLRNPNDHSEIAEFAKNAFLDQSFPKQEKDYHRLSDYLELNGNYLPSMAVFDETYRAYEASESTGGDSYQ

SEQ ID NO: 3787 - protein, 109 aa, Lactobacillus gasseri
  strain ATCC 33323 / DSM 20243
MSRRPNFGGMGMGNMQGLIKQAKKMQQQMEAEQANLATQEFVGKSADDMVVATFSGDRQLKDLKIDKEAIDPDDPDMLQDLVIDAVNKGIKAVDDATQASMGKYTKGLM

SEQ ID NO: 3788 - protein, 79 aa, Lactobacillus gasseri
  strain ATCC 33323 / DSM 20243
MFVKTGDKVKVIAGKDKGKEGTVLSVNAKTNRIVVKGVNKIKKHEKPSQANANGGVVEKEGSIHASNVKVIAKKEDNNK

SEQ ID NO: 3789 - protein, 95 aa, Lactobacillus gasseri
  strain ATCC 33323 / DSM 20243
MSRSIKKGPFADASLLKKIEAQEGSEKKQVIKTWSRRSTIFPSFVGFTIAVYDGRKHVPVYITEDMVGHKLGEFVPTRTFRGHKVADKATTTVGK

SEQ ID NO: 3790 - protein, 79 aa, Lactobacillus delbrueckii
  subsp. bulgaricus
  strain ATCC BAA-365
MFVKTGDKVKVIAGSEKGKEGTVLSVNVKKNRVVVKGVNMIKKATKASASNANGGVVETEGSIHASNVKVIAKAESNKD

SEQ ID NO: 3791 - protein, 83 aa, Lactobacillus delbrueckii
  subsp. bulgaricus
  strain ATCC BAA-365
MKKGIHPDYQEVCFMDAATGFKFVAGSTLKSSETVEFEGNTYPLIRVEISSDSHPFYTGKQKFAAADGRIERFNKKYGFNKKN

SEQ ID NO: 3792 - protein, 383 aa, Saccharomyces cerevisiae
  strain ATCC 204508 / S288c
MTSASITNTGNETMNLPQMRSIWLDEDEEAEKLYGLQAQQFMGSDDEENLGITFINSDKPVLSNKKNIELPPLSPNSHPSCHHRRSNSNSAKSKESSSSSSSANKTNHKKVFLKLNLLKKKLLGAQPDIRGKGISTPFDFQHISHADTRNGFQDEQLQEPSSLSTEIKDDYTSSSSKRDSKSLNKAFVTERIPANRESKLISRSHENKTSRLSVARSISVTSSNYSKNTQGNNHSINGRVVSTSTMATSIFEYSPNASPKQFKNKSHALGHRYTNSTDSSESSLDFLKNYNFPTLLEDKPILDFLPRSQRSSAYRSLLETPNSNKDSAKAFFPSRQSPLPKRRNSIATPSPQSKFSYSDSPVNHRKSFDDVLYSFNQLEPLQT

SEQ ID NO: 3793 - protein, 115 aa, Solanum lycopersicum
MEEEKHHHHHLFHHKDKAEEGPVDYEKEIKHHKHLEQIGKLGTVAAGAYALHEKHEAKKDPEHAHKHKIEEEIAAAAAVGAGGFAFHEHHEKKDAKKEEKKKLRGDTTISSKLLF

SEQ ID NO: 3794 - protein, 105 aa, Saccharomyces cerevisiae
  strain ATCC 204508 / S288c
MLMPKEDRNKIHQYLFQEGVVVAKKDFNQAKHEEIDTKNLYVIKALQSLTSKGYVKTQFSWQYYYYTLTEEGVEYLREYLNLPEHIVPGTYIQERNPTQRPQRRY

SEQ ID NO: 3795 - protein, 52 aa, Citrus sinensis
MAVPKKRTSILKKRIRKNLWKKGGYWAALKAFSLAKSLATGNSKSFFCTTNK

SEQ ID NO: 3796 - protein, 55 aa, Daucus carota
MAVPKKRTSISKKRIRKNIWKGKGSWAALKALSLGKSLSTGNSKSFFVRQKKNKS

SEQ ID NO: 3797 - protein, 194 aa, Bos taurus
MTENSTSTPAAKPKRAKASKKSTDHPKYSDMIVAAIQAEKNRAGSSRQSIQKYIKSHYKVGENADSQIKLSIKRLVTTGVLKQTKGVGASGSFRLAKSDEPKRSVAFKKTKKEVKKVATPKKAAKPKKAASKAPSKKPKATPVKKAKKKPAATPKKTKKPKTVKAKPVKASKPKKTKPVKPKAKSSAKRTGKKK

SEQ ID NO: 3798 - protein, 149 aa, Oryza sativa
  subsp. japonica
MADQLTDDQIAEFKEAFSLFDKDGDGCITTKELGTVMRSLGQNPTEAELQDMINEVDADGNGTIDFPEFLNLMARKMKDTDSEEELKEAFRVFDKDQNGFISAAELRHVMTNLGEKLTDEEVEEMIREADVDGDGQINYDEFVKVMMAK

SEQ ID NO: 3799 - protein, 86 aa, Sus scrofa
MSKQPVSNVRAIQANINIPMGAFRPGAGQPPRKKECTPETEEAVLPTSDEEKKPIPGAKKLPGPAVNLSEIQNIKSELKYVPRAEQ

SEQ ID NO: 3800 - protein, 587 aa, Bos taurus
MDLPGDSSTPGRQRLCRQPHAGALWGAKSPKRPKLQPLGAPSPLEKASRRVLAVVLEDVMAARMVPLEPQEESSTPRHHSNHRDSVRSQPPASPPRQAMWSPQARPPDPLHLCREPLSRIRRPPSTPRRQSRTTPGPDEGPSQKVDQVHQPTLVVMLQDIASSRPRAEGFADEAPNFIIPARRAEPKVMVHQPKPPSRDLPAPSRPSALSANPLASPPPAPDPVLEPPSTPPPSSLLRPRLSPWGLAPLFHSVRSKLESFADIFLTPNKAPRPPPPSPPMKLELKIAISEAGQPGASEGTVTVSPRPPIRQWRAQDQNPSATLTKPSLGRSHSCPDLGPPGPDPCSWPPVPAPSSRPRPRRHTVGGGEMAKAPPPPRPCLRKEVFPLGGVGASPPLVTSCSSTASTSSFSEPAEPRLSSTKRKEPRAPEDQVLPDSETKTIGKVSRFRIRRTPARSQINLTPMGLPRPVRLNKKEFSLEEIYTNKNYQSPTTRRTFETIFEEPRERNGTLIFTSSRKLRRTVEFRDSSLPRSRRPSRGARATAGRTLPPSLAPSPDVEPLLQQRLQELDASLLEEEEEGDQDQPHRT

SEQ ID NO: 3801 - protein, 447 aa, Saccharomyces cerevisiae
  strain ATCC 204508 / S288c
MSSQNLNDNPKNTSSAAEDKKKQTSSLKLAPIPTTSPWKSSSPDSNTVIPVEELRDISKTAKPSKNGSGSIKLTSNTKWTPITPSVIISGSKDTNSKSGKNSKNSKTNKKMKKRGKYNNDINKKDFNGQTNSTSEISNVSNLESKPLDANAKVNIHSSSGATANGNIKRITNNNNSTNGRQSRNYQNRNGKTRYNNNSRHSQAANNAISFPNNYQARPEYIPNASHWLNNNSRNSYKQLSYFRQQQYYNNINYQQQLQTPYYYSMEPIFKSIESIKNQIEFYFSEENLKTDEFLRSKFKKANDGFIPMSLIGKFYRMVNLSLGGDPNLILASMREVLQHKETNHLEIALGSIEGAQKNMADDFNPLENYFIRRENWAEYAMESNFDENDDETEKYNIEKLLGPNDLDNYSYMGYPNFFPSNENGKKSQSYDQGEISRQFEQNLQIND

SEQ ID NO: 3802 - protein, 63 aa, Saccharomyces cerevisiae
  strain ATCC 204508 / S288c
MAKVHGSLARAGKVKSQTPKVEKTEKPKKPKGRAYKRLLYTRRFVNVTLVNGKRRMNPGPSVQ

SEQ ID NO: 3803 - protein, 295 aa, Saccharomyces cerevisiae
  strain ATCC 204508 / S288c
MATFNPQNEMENQARVQEYKVSTGRGGAGNIHKSMSKPSPVLLPLKSNSKTVANNNNNGSNQEKVPRFAIGRGGAGNIFHDPHLTRSAQQLDSNDNINYNDVINDIDDYISPITSDMVDEGGSNPVTNTRSRISATRSHQSLHATTSSPNNNAPIVVGRGGAGNIFFNKKKVASNGGNEEDEIRGGNIEDEDTINANEDNLFVVTSNGNALAAIKSTSKKPKNKLKGKSAPEKFAIGRGGAGNIISPKSSRNTINHNLNDDDEDKFNLKDDNGKEKKKKKKKKSGFFSSLKTMFN

SEQ ID NO: 3804 - protein, 62 aa, Bos taurus
MSERQGAGTTNGKDKPSGENDGQKKVQEEFDIDMDAPETERAAVAIQSQFRKFQKKKAGSQS

SEQ ID NO: 3805 - protein, 37 aa, Populus alba
MKIRASARKICEKCRLIRRRGRILIICSNPRHKQRQG

SEQ ID NO: 3806 - protein, 103 aa, Lactobacillus delbrueckii
  subsp. bulgaricus
  strain ATCC 11842 / DSM 20081
MYAVIKTGGKQYKVAEGESIFVEKLDVQAGEEVVFDQVILVANGDDVKVGTPLVEGAKVVASVDKQGKEKKVVTFKYKPKKHSHSKYGHRQPYTKVTVKSIEA

SEQ ID NO: 3807 - protein, 83 aa, Lactobacillus delbrueckii
  subsp. bulgaricus
  strain ATCC 11842 / DSM 20081
MPQIKSAIKRVKTQAVANERNAAQLSTMRTAVKKFKAAQAAGADNASELYVAAIRELDKAASKGLIHKNKATRDKSRLAKLAK

SEQ ID NO: 3808 - protein, 79 aa, Lactobacillus delbrueckii
  subsp. bulgaricus
  strain ATCC 11842 / DSM 20081
MFVKTGDKVKVIAGSEKGKEGTVLSVNVKENRVVVKGVNMIKKATKASASNANGGVVETEGSIHASNVKVIAKAESNKD

SEQ ID NO: 3809 - protein, 91 aa, Lactobacillus delbrueckii
  subsp. bulgaricus
  strain ATCC 11842 / DSM 20081
MSRSIKKGPFADAHLLKKVDEQQAAEKKQVIKTWSRRSTIFPSFVGLTIAVYDGRKHVPVFVTEDMVGHKLGEFVPTRTFRGHKADDKASK

SEQ ID NO: 3810 - protein, 378 aa, Bos taurus
MASKPEKRVASSVFITLVPPRRDEAVVEEVRRAACEAWPGRPWESAPTKAPGAGSVGKLRSWMPPGRAAAPGPAVPPQLSNGGCSLPPPPLDVDDALPDLDLLPPPPPPPAADLPPPDEEPHSAMGASLISDLEQLHLPPPPPPPQALVEGPPLQPRPSHLKPAEEELPPPPEEPVSFPEREASTDICAFCHKTVSPRELAVEAMKRQYHAQCFTCRVCRRQLAGQSFYQKDGRPLCEPCYQDTLEKCGKCGEVVREHIIRALGQAFHPSCFTCVTCARRIGDESFALDSQNEVYCLDDFYRKFAPVCSICENPIIPRDGKDAFKIECMGRNFHENCYRCEDCRVLLSVEPTDQGCYPLNNRLFCKPCHVKRSAAGCC

SEQ ID NO: 3811 - protein, 98 aa, Bos taurus
MLSRLQELRKEEETLLRLKAALHDQLNRLKVEELALQSMISSRREGEMLPSQPAPEPSHDMLVHVDNEASINQTALELSTRSHVQEEEEEEEEEEEDS

SEQ ID NO: 3812 - protein, 159 aa, Bos taurus
MEKACKEPEEQPQSPPKADEERPSVEPSPEKSSPEEQSSEEVSSEEEFFPDELLPELLPEMLESEERPPQERLSRKDLFEARPPMEQPPCGVGKHKLEEGSFKERLARSRPQFRGDIHGRNLSNEEMIKVAEEMEEMKRVRNKLMVMHWKARRNRPYPI

SEQ ID NO: 3813 - protein, 131 aa, Bos taurus
MLSGGGGDADLANAAARGQVEAVRQLLEAGVDPNRLNRFGRRPIQVMMMGSARVAELLLLHGADPNCADPATLTRPVHDAAREGFLDTLVALHRAGGRLDVRDAWGRLPVDLAEERGHRDVARYLRATAGD

SEQ ID NO: 3814 - protein, 54 aa, Gossypium hirsutum
MAVPKKRTSTSKKRIRKNVWKKKGYWAALKAFSLAKSLSTGNSKSFFVRQINLE

SEQ ID NO: 3815 - protein, 87 aa, Solanum bulbocastanum
MVKNSVISVIFQEEKKGSVEFQVFNFTNKIRRLTSHLELHKKDYLSQRGLKKILGKRQRLLAYLAKKNRVRYKELINQLDIRETKTH

SEQ ID NO: 3816 - protein, 53 aa, Glycine max
MAVPKKRTSISKKRIRNTLWKKKGYFTTLKAFSLAQSIFTGNSKSFFCNKYKR

SEQ ID NO: 3817 - protein, 90 aa, Glycine max
MVKNSIIPVISQEKKEKNPGSVEFQIFKFTDRIRRLTSHFELHRKDYLSQRGLRKILGKRQRLLSYLSKKDRIRYKKLINQFDIRESQIR

SEQ ID NO: 3818 - protein, 216 aa, Glycine max
MGQKINPLGFRLGTTQSHDSIWFAQPTNYSENIQEDKKIRDCIKNYIQKNIRISSGVEGIGQIKIQKRIDLIQVIIYMGFPKLLIEGKSQKIEELQTNMQKKLNCVNRKLNIAIVKVANAYKHPNIIAEFIAGQLKNRVSFRKAMKKAIELTEQAGTKGVQVQIAGRIDGKEIARVEWIREGRVPLQTIRAKIDYCCYTVRTIYGVLGIKVWIFSK

SEQ ID NO: 3819 - protein, 388 aa, Bos taurus
MAEDGLPKIYSHPPAESTKTTTEATIFFGADNTIPKSETTITSEGDHVTSVNDYMLENDFSTTTGNKLIPPKERQKSEDDVESHLEKEFATLMDIKNPMANESITENFLPVKTGNISSTDAISLIDFSTDIAKEDILLDTIDPGDKDVSLTSEVSGTPKESTAAIADTPILPNIMGKSDVSNYSSSVKFKVPADGNAHITDSSVPEAEITPTTERNLTTIPDITALTEEKITEIDLILPENDPNVVPKLTDSDEEKFITVFELTTTAERDKDNPEDALLTDEESTDEVSVWMERDMANEEESHSVLLTAVESRYDFVIPASVTMNLTEDLLTEEDLPENNRMESVTKNTDELSGTTPDLDAFSHKEDNFTTETGVFKLLKEEPDEFLI

SEQ ID NO: 3820 - protein, 62 aa, Saccharomyces cerevisiae
  strain ATCC 204508 / S288c
MDTEEKKKTTASVEHARMLQNEIQQLFAQLRDTNSQIRCDLNEFEQIKESSTTADSTTNSAN

SEQ ID NO: 3821 - protein, 241 aa, Bos taurus
MPIFKCPQKSEPLWKEWDQKAQKNGLRHQVFAVNGDHYVGEWKDNVKHGKGTQVWKKNGAIYEGDWKSGKRDGYGTLSLPDQETGKYKRAYSGWWKGDKKCGYGIQFFGPKEYYEGDWCGNQRSGWGRMYYSNGDIYEGQWRNDKPEGEGMLRLKNGNRYEGNWQRGVKNGSGRFFHLDHGQLFEGFWVDDVAKCGTMIDFGRDEAPQPTQFPIPEVKILDPDGVLEEALAMFKKTKEEGD

SEQ ID NO: 3822 - protein, 196 aa, Bos taurus
MSQSESPGLQEESLHGSWVELHFGSNGNGSSVPDSVSIYKGDMEKILLDAQHESGRSSSKSSHCDSPPRSQTPQDTNRASETDTHSLGEKNSSQSEEDYMERRKEVESILKKNSDWIWDWSSRPENVPPAKEFLLFKHPKRTPTLSMRNTSVMKKGGIFSAEFLKVFLPSLLLSHLLAIGLGIYIGRRLTTSTSTF

SEQ ID NO: 3823 - protein, 88 aa, Bos taurus
MANSDVKPKSISRAKKWSEEIENLYRFQQAGYRDEIEYKQVKQVSMVDRWPETGYVKKLQRRDNTFYYYNKQRECDDKEVHKVKIYAY

SEQ ID NO: 3824 - protein, 66 aa, Bos taurus
MDPPARKEKPKVKEPVSRIEKAKQKSAQQELKQRQRAEIYALNRVMTELEQQQFDEFCKQMQPPGE

SEQ ID NO: 3825 - protein, 93 aa, Bos taurus
MGSRCAKLGTGHGRGHESSMKKLVACVSQDNFSLSSEGEEEEEGEEEEEEEGEEEELPVQGKLLLMEAGQQEEGAEDADSEVQQSPEPKQTRS

SEQ ID NO: 3826 - protein, 125 aa, Bos taurus
MAAAGLAQIPDVDIDSDGVFKYVLIRVYAAPPSGDPAVETKEIVRGYKWAEYHADIYDKVSGEIQKKGYDCECLGGGRISHQSQDRKIHVYGYSMGYGRAQHSVSTEKIKAKYPDYEVTWADDGY

SEQ ID NO: 3827 - protein, 57 aa, Bos taurus
MKPAVDEMFPEGAGPYVDLDEAGGSTGLLMDLAANEKAVHADFFNDFEDLFDDDDIQ

SEQ ID NO: 3828 - protein, 218 aa, Lactuca sativa
MGQKINPIGFRLGTTQGHHSLWFAQPKNYSEGLQEDKKIRTYIQNYVQKNMKTSSGVEGIARIEIQKRIDLIQIIIYMGFPKILIESRPRGIEELQMNLQKEFHSVNRKLNIAITRIEKPYGNPNILAEFIAGQLKNRVSFRKAMKKAIELTEQADTKGIQVQIAGRIDGKEIARVEWIREGRVPLQTIRAKIDYCCYTVRTIYGVLGIKIWIFIDGE

SEQ ID NO: 3829 - protein, 68 aa, Saccharomyces cerevisiae
  strain ATCC 204508 / S288c
MHLCQNGHYYKPHRASAEKVPYLKKKKKNSRNEGKAKKKNEKKKIGTVEFFQQKKKEKKRVLNAVCGL

SEQ ID NO: 3830 - protein, 64 aa, Saccharomyces cerevisiae
  strain ATCC 204508 / S288c
MSSRQGGKMKPLKQKKKQQQDLDPEDIAFKEKQKADAAAKKALMANMKSGKPLVGGGIKKSGKK

SEQ ID NO: 3831 - protein, 68 aa, Saccharomyces cerevisiae
  strain ATCC 204508 / S288c
MAKSVFNFFHFEILEYLNRFVYHSQYFLPYYCSLEVLGKSRKNWTFQYWCLYITTDKKIIKKKDFYHR

SEQ ID NO: 3832 - protein, 140 aa, Sus scrofa
MDVFMKGLSKAKEGVVAAAEKTKQGVAEAAGKTKEGVLYVGSKTKEGVVHGVTTVAEKTKEQVTNVGEAVVTGVTAVAQKTVEGAGSIAAATGFGKKDQLGKNEEGAPQEGILEDMPVDPDNEAYEMPSEEGYQDYEPEA

SEQ ID NO: 3833 - protein, 92 aa, Bos taurus [sequence omitted]

SEQ ID NO: 3834 - protein, 592 aa, Bos taurus
MAPPVKGKRKQSEEGEPLDPPVSPQPDGEPRSRSPVRLEEPPEAGREREEEQEEEQAFLVSLYKFMKERHTPIERVPHLGFKQINLWKIYKAVEKLGAYELVTGRRLWKNVYDELGGSPGSTSAATCTRRHYERLVLPYVRHLKGEDDKPLPPSKPRKQYKMAKEPRGDDGATERPKKVKEEKRVDQLMPAKTKTDAPDPARLPSQETPRDGMEQRGPAAGPSLPFLGASGCPEAYKRLLSSFYCRGTHGIMSPLAKKKLLAQVSKAEALQCQEEGCRHGAGGEPQAPPAAPPLESPQSPGGPAEDSRHRLTPLEGRQAPGGGLWGETQAGPRPSAPVVTGCFHAYPSEVLKPISQRPRDLFPSLKDRVLLGPPAKEEGLPAKEPPLVWGGDAGRPSAFHKGSSRKGSLYPKPKACWVSPMTKVPAESPVPLPTFPSSPGLGHKRSLAEDSSVHGSKKLRAVSPFLKEANAQECGTKPRGPDLAVSCLLGPALPEAYRGTLLRCPLNFAGTLGPLKGQATLPFSPLVIPAFPAHLLATTAPSPMTAGLMHLPPASFDSALCHRLCPASSPWHVPPATAYTAPHFSFHLNTKL

SEQ ID NO: 3835 - protein, 51 aa, Bos taurus [sequence omitted]

SEQ ID NO: 3836 - protein, 140 aa, Bos taurus
MSGSFYFVIVGHHDNPVFEMEFLPAGKAESKDDHRHLNQFIAHAALDLVDENMWLSNNMYLKTVDKFNEWFVSAFVTAGHMRFIMLHDVRQEDGIKNFFTDVYDLYIKFAMNPFYEPNSPIRSSAFDRKVQFLGKKHLLS

SEQ ID NO: 3837 - protein, 57 aa, Acorus calamus
MAVPKKRTSISKKRIRKNFWKKKGYFAAVKAFSLAKSVSTGQSKSFFVRQTSNKSLE

SEQ ID NO: 3838 - protein, 37 aa, Acorus calamus
MKIRASVRKICEKCRLIRRRGRIIVICYNPKHKQRQG

SEQ ID NO: 3839 - protein, 86 aa, Bos taurus
MSKQPVSNVRAIQANINIPMGAFRPGAGQPPRRKECTPEIEEGAPPTSDEEKKPIPGAKKLPGPAVNLSEIQNIKSELKYVPKAEQ

SEQ ID NO: 3840 - protein, 445 aa, Zea mays; identical to SEQ ID NO: 90

SEQ ID NO: 3841 - protein, 134 aa, Cucumis sativus
MGKDTIANIITSIRNADMNRKGMVRIPATNITENIVKILLREGFIENVRKHRESNKDFWVLTLRHRRNRKGPYKTILNLKRISRPGLRIYSNYQKIPRILGGMGIVILSTSRGIMTDREARLQGIGGEILCYIW

SEQ ID NO: 3842 - protein, 90 aa, Cucumis sativus
MVKNSFSSVISQEEKKENGGSVEFQVVSFTNKIRRLTSHLELHKKDYLSQRGLRKILGKRQRLLSYLSKKNKMRYKELINQLDIRESKTQ

SEQ ID NO: 3843 - protein, 218 aa, Cucumis sativus
MGQKINPLGFRLGATQGHHSLWFAHPKKYSEGLQEDQKIRDCIQNYVQKNMRIFSGVEGIARIEIQKRIDLIQVIIFMGFPKLVIDDGSRKIEELQINVQKEFNSGNRKLNIAITRIGNPYGHPNILAEFIAGQLKNRVSFRKAMKKAIELTEQAGTKGIQVQIAGRIDGKEIARVEWIREGRVPLQTIRAKIDYCCYPVRTIYGILGIKIWIFVDEQ

SEQ ID NO: 3844 - protein, 291 aa, Bos taurus
MKSEAKDGEEESLQTAFKKLRVDASGSIASLSVGEGASVRASVRAAVEDAKPKSACASKDSWHGSTRKSSRGAVRTQRRRRSKSPVLHPPKFIHCSTIASSSSQLKHKSQTDSPDGSSGLGISTPKEFNAGECSSSLDTNHTGAVAEPLRTSVPRLPSESKEEDSSDAPQVSQASLQANDLSDFQSVSKLNLGKPCVCIGKECQCKRWHDMEVYSFSGLQNVPPLAPERRSTLEDYSQSLHTRTLSGSPRSCSEQARVYVDDVTIEDLSGYMEYYLYIPKKMSHMAEMMYT

SEQ ID NO: 3845 - protein, 102 aa, Bos taurus
MSSPPEGKLETKAGHPPAVKAGGMRIVQKHPHSGDTREEKDKDDQEWESPSPPKPTVFISGVIARGDKDFPPAAAQVAHQKPHASIDRHPSPRTQHIQQPRK

SEQ ID NO: 3846 - protein, 326 aa, Gallus gallus
MVDYYEVLGVQKHASAEDIKKAYRKLALKWHPDKNPENKEEAEQQFKQVAEAYEVLSDAKKRDIYDRFGKEGLINGGGGGSHHDNPFEFGFTFRNPDDVFREFFGGRDPFSFDFFEDPFEDFFGGRRGPRGSRSRAGGSFLSAFGGFPAFGNAFPSFDTGFTSFGSLGHGGLTSFSSTSFGGSGMGNFKSVSTSTKIVNGRKITTKRIVENGQERVEVEEDGQLRSLTINGEANEEAFAEECRRRGQHALPFQPTNTRLLKPHKPASSPRYAYHYNSDEVEEQEKSRVASSLETPFYLSGYKEGSKRRKQKQREEQKKKKSTKGSY

SEQ ID NO: 3847 - protein, 66 aa, Lactobacillus acidophilus
MPKMKTHRASAKRFKRTANGGLKRHHAFTGHRFHGKTKKQRRHLRKPAMVSRSDMKRIKQMVAQMH

SEQ ID NO: 3848 - protein, 76 aa, Lactobacillus acidophilus
MAYRESFYRYLMTQRDADSSDEVAQFANNAQHDLTFPKQEQDYEELSDYLELNASYLPSMSVFDRAYKMYEEKMMY

SEQ ID NO: 3849 - protein, 38 aa, Lactobacillus acidophilus
MKVRPSVKPMCEHCKVIKRHGRVMVICPANPKHKQRQG

SEQ ID NO: 3850 - protein, 94 aa, Lactobacillus acidophilus
MSRSIKKGPFADASLLKKVDAQADADKKQVIKTWSRRSTIFPSFVGLTIAVYDGRKHVPVYITEDMVGHKLGEFVPTRTFHGHKSTDDKATSQS

SEQ ID NO: 3851 - protein, 51 aa, Oryza sativa
  subsp. japonica
MPSHKTFQIKKKLAKKMRQNRPIPYWIRMRTDNTIRYNAKRRHWRRTKLGF

SEQ ID NO: 3852 - protein, 76 aa, Gallus gallus
MARGQQKIQSQQKNAKKQAEQKKKQGHDQKAAAKAALIYTCTVCRTQMPDPKTFKQHFESKHPKTPLPPELADVQA

SEQ ID NO: 3853 - protein, 262 aa, Gallus gallus; identical to SEQ ID NO: 9

SEQ ID NO: 3854 - protein, 483 aa, Bacillus licheniformis; identical to SEQ ID NO: 429

SEQ ID NO: 3855 - protein, 50 aa, Equus asinus
MARYRCCRSQSQSRCRRRRRRRCRRRRRRCVRRRRVCCRRYTVLRCRRRR

SEQ ID NO: 3856 - protein, 233 aa, Gallus gallus
MNLNFTSPVHPVPAPRPTSFFIEDILLHKPKPLREVPPEHFAGSLASRVPLLDYGYPLMPAPALLAPHPHPALHKPEHHHHHPYFLTTSGVPVPALFPHHAHAELPGKHCRRRKARTVFSDSQLSGLEKRFEIQRYLSTPERVELATALSLSETQVKTWFQNRRMKHKKQLRKSQDDPIHEENREQSSPEPELPEPAAAEPRKGPPGPFLLQDPEDEVDILEEGDILAAPHRL

SEQ ID NO: 3857 - protein, 103 aa, Lactobacillus johnsonii
MYAVIKTGGKQYKVAKGDSVFVEKLEVKPGDEVTFDEVILVNDGKSTKIGTPVVEGAKVVAKVEKQGKEKKVVTFKYKPKKHSHTKYGHRQPYTKVTIESIEA

SEQ ID NO: 3858 - protein, 109 aa, Lactobacillus johnsonii
MGKRPNFGGMGMGNMQGLIKQAKKMQQQMEAEQANLATQEFVGKAADDMVVATFSGDRKLKDLKINKEAIDPDDPDMLQDLVIDAVNKGIKAVDDATQASMGKYTKGLM

SEQ ID NO: 3859 - protein, 53 aa, Lactobacillus johnsonii
MEDKHGIKDKVAGKLKEVEGKITGDKAREVEGKAQQAKGKVKSKATEVKEDLE

SEQ ID NO: 3860 - protein, 149 aa, Solanum tuberosum
MADQLTEDQISEFKEAFSLFDKDGDGCITTKELGTVMRSLGQNPTEAELQDMINEVDADGNGTIDFPEFLNLMARKMKDTDSEEELKEAFRVFDKDQNGFISAAELRHVMTNLGEKLTDEEVDEMIREADVDGDGQINYDEFVKVMMAK

SEQ ID NO: 3861 - protein, 76 aa, Sus scrofa
AKVTEKSWQPQTTSTKRWKKRKTPSQPRSRGKVRKIYKKVKRPLHVCSRKKYSPKVITTSRRQKRARRANKFETIP

SEQ ID NO: 3862 - protein, 213 aa, Oryza sativa
  subsp. japonica
MGCFQSTARRPRPGYEDPVGLASETAFSVSEVEALFELFKSISGSVIDDGLINKEEFQLALFKNKRKENLFANRIFDLFDVKKRGVIDFGDFVRALNVFHPNIPMEEKIDFSFKLYDMDNTGFIERKEVKQMLIALLGESEMRLSDEIIETILDKTFSDADTNQDGRIDRTEWENFVSRNPSLLKIMTLPYLKDITTTFPSFVFNSEVDDLVT

SEQ ID NO: 3863 - protein, 76 aa, Bos taurus
MMEVESSYSDFISCDRSGRRNAVPDIQGDSEAVSVRKLAGDMGELALEGAEGQAEVGTSDKEASSQPESSDGTTSS

SEQ ID NO: 3864 - protein, 84 aa, Lactobacillus plantarum
MPIIKSAIERVKTNNKANVRNTAQMSAMRTAVKKFEAAKTAGADNVDDLYLAATSAVDKAASKGLIKRNKAARDKSRMAARYAK

SEQ ID NO: 3865 - protein, 73 aa, Lactobacillus plantarum
MSDVNKKFDSKKDQLSGKAKEVEGKVTGDRAREAQGKTQSLMGKAKDKLADAEETVKGVVDEAKDKMKKKSDD

SEQ ID NO: 3866 - protein, 76 aa, Lactobacillus plantarum
MAEQPTFEQNLSQLETIVNQLEQGDVPLEQALDQFQKGVALSKQLQATLEGAEKTLTKMMNENGDEVPFEQADANE

SEQ ID NO: 3867 - protein, 102 aa, Lactobacillus plantarum
MYAIIVTGGKQYKVEAGQAIYVEKLDAAAGDKVTFDQVVFVGGDTTKVGTPTVDGATVEGTVEKQGRDRKVVTFKYKAKKGQHTKKGHRQPYTKVTIDTINA

SEQ ID NO: 3868 - protein, 64 aa, Lactobacillus plantarum
MPKQKTNRAAAKRFKVTAKGKIKSANAFTSHRFHGKTKKQRRQLRGTAIIEKPMVKTYHKLLQK

SEQ ID NO: 3869 - protein, 91 aa, Lactobacillus plantarum
MGRSLKKGPFADAHLLKKIDAQSDSDKKSVIKTWSRRSTIFPSFIGYTIAVYDGRKHVPVYIQDDMVGHKLGEFVPTRTFHGHGTDDKKTK

SEQ ID NO: 3870 - protein, 102 aa, Lactobacillus plantarum
MMRGMGNMQSMMKQMKKMQAQMTAEQAALNEQTFTGAAPDDMVKVTFTGDKKMKDITINPDAVDPDDVDMLQDLVVAAVNDALTKVDEQTQSTMGKYTKGLQ

SEQ ID NO: 3871 - protein, 57 aa, Bifidobacterium longum
MTMAKSADIRPGITLACTECKERNYITTKNRRNTPDRLELKKFCPRCGKQTVHRETR

SEQ ID NO: 3872 - protein, 314 aa, Bacillus licheniformis; identical to SEQ ID NO: 663

SEQ ID NO: 3873 - protein, 49 aa, Sus scrofa
YLDHGLGAPAPYPDPLEPRREVCELNPDCDELADHIGFQEAYRRFYGIA

SEQ ID NO: 3874 - protein, 32 aa, Saccharomyces cerevisiae
  strain ATCC 204508 / S288c
MPILVWQLPKSKKLKTLKYRICFREFFDRVET

SEQ ID NO: 3875 - protein, 46 aa, Saccharomyces cerevisiae
  strain ATCC 204508 / S288c
MLTTQKCESREGKNDEIFELGESNSDKILLKHGKCNLFSERKPVNH

SEQ ID NO: 3876 - protein, 26 aa, Saccharomyces cerevisiae
  strain ATCC 204508 / S288c
MRLNYSRCYYSSQRRRQSLPKRFPLI

SEQ ID NO: 3877 - protein, 3562 aa, Gallus gallus
MLLNIKSIIWMCSTLAITYMLPKVKAEKKTLVKGSLSGTSVLPCFFSTTPTIASSYAAEYLRIKWSKVELDKSGKDAKETTVLVAQNGNIKIGQNYKDRVSVPTHSEETGDASLTFSRLRASDAGVYRCDVMYGVEDTQGIVSLAVDGVVFHYRAATSRYTLNFTQAQQTCLDNGAVIASPEQLKAAYEDGFEQCDAGWLSDQTVRYPIRHPRIGCFGDKMGKKGVRTYGRRFPNETYDVYCYVEHMQDEVVHVSVPEKLTFEEAKELCRKRDGVLASVGNMYVAWRNGFDQCDYGWLADGSVRYPASVARPQCGGGLLGVRTLYRYENQTGFPYPDSKFDAYCYERKKIVSEPTTVKLVTTLKTDSVELSSAKVTLKPSVFESSVTEVAVTKTKVPAWEEATLETEDTKMTTEVAEEKREMEVLMENIKLTTLLPQTVTDGEISPYDTLGRTEYDVSPRLTESTSAALEVEHTYSEAELSEEQGRSESTEDAFLTSVVFQDSTAVAKSSTGSWEDIETGDTQKHDGDNQTEQIEVGPVMTATDSLVPASQRELPRTGSSVSLTKENLYLGSHSTKEPTKKSMEAKSDKKLTTVVIPKALFTDQYDLTTGGEGRESMYTVMPDRVSGVALVSIPESDVPAVSETLMDELAVTTGQSSTADESTPFIKFSSSATELDNEASAEGSREDLKDVHLTTSSGIPVSFTLFTANETGSEVTALSESTSAPQKFEEGITSVLHSSQQTEGSAILEKQEKTKEPEMSTIDAKVLYITTVVPASVTAGSEGRFGSEKFTHTPPVSGMWLQTDKDQVYMTEETSHTKRIELDTEDDISGMEPTSSPGQIIEYTKHLGAPVSAVTDETKTSMETAETESDEEVVSADFDQTKGTTEVFHTSSSLDLEKFTLSKIPEDESSATVKSFSSSSGTVLPTAVATVLEVTDHEADETSGYVLNMTFSTPEGEQRKATEKSPATSAEDEVSTGTEISKYTMTEGGQISSVTSAEKESVAALQEREEQPSVGLPETKEPFKFTDVTEIETTVPQREGDTSLVPVTVGSEDIGEMQVTDHTSFDSIIHTEATVTSTKASEVFPKELSTKDQDRELGTAMGSTLPVTSVQMHEQKTTAGFESPQTTTQEKHDEMGSAYDEMYPATELSVPALMLTEYGQVSGPVETSTRSLHLTGTPKAETATDQEEKITEAVPVTFGTQAKVYESKGTTTREEDRDVGSWNSVLPPHTMLSSPSTAGSISLLTLGASPSQTPEGSGISEELEEVKTVPFSSRATDKTTVISDLTTSSISAVDKIQPTSASKPFVSSKSPRIIPEEDEEVTSSDIIVIDESISPSKASAEDDLTGKMVEPEIDKEYFTSSTATAVARPTAPPTVMEATEALQPQEVSPTSHPDSGTDIRLYVIQITGNDTDHPVNEFLDLFSRHILPHAVDETHTDAESAQTEPCTSDSVQDSSEYIILDPFFPNFMDFEEEEEDCENTTDVTTPPALQFINGKQQVTSAPKSTKAEEARSDQIESVAHSKNVTFSQINETNTFIISETEASGTMQPSKAGEVMGAFEVTQPTADVAMLEPVYSGESEVTTTDKYLEITSVYEQSPKKNKETVMWHGTEESSTKDTKNLLLITNESSGDGSTESDLSRSVFTEILTMSSHEDSEKISHTTSVPTILSVERSAVTAAPSADSDTATVGIDVKDLIPKGGTATPGNYYKSTIKLDAEFPFESNPEATSHTTKPDMTASSFIVLEGSGDVEENSTLASAMTTETAVAETLSVQDTSLGSGTVLPTEISVTISEITPALPGGTRILYSTFDQSSEATVSTNFVSELIMEQVVGSSVATEKKVEDEKEVQTTVYSSQEISTTDAKGKSELDEFGSTTNEVRTVSQEPTPLREIVPITGTMHSEIKKVTATPFLREKLFINEGSAEEPADLFAGSPTRKVVSTDSPFTDSGSGDIDVITESATLTSVPSRSVIETQTVKHEGNINVISVSLKNTTTEYEEHIGTGGPVTSVSSTGSDGLTEESEVAIEMSENVFSTENQGEPTQEAVPTYTAPSDIKSRLGSRREVTSHVTPVIRTKDLETAEVTSSPESVVNNSTLDTMVTHGTIRAVAESTESKKGKGSFSAVSLGKILMIEHGSGEELKVDSSTTKLMSNGPTEKLLGSHFSFFDQGSGEAETLTESFTKASVSPTGKPEPQEQYGRKTVSMPSAVVHAYTAEPNELVTSTEHDITSLQTVTDTEMEEKAANELTVTSFATNLPLSEDVHSWEDRPREILPKAIESSGEATEDPFFISTQANHEHVEFLSVPTIRPHSEENKVEAESDEKILLPFNNDRVTESAVIERKYLSSPFTDTEQEEELVQNIFPTEDIPRLFLTPKEEKPTNNELISDPLFSGQGSGDEFTVIPSVESLAVKETTNTLSPWPFHPASVGPKLSTDKTQVFESGSTDSNAEINEEITTTAAELTETAYSMATSSPALEEESSSHSNSKDKDITHYFLVIEDPYNKEMDHRRGENGTSRPLPTPGDVSLEESSHMLTTDDVTPVSVILSETPYLEMGKSLATSATKMPSRVLPESSGEGSGWDGVSDSFAPDTLTHSTAPSVMEVELTASSHIPGVYSEVMTTHVPGDGSQTVITGLASLFTEEKEIVANRTAADPKTGTSEELTSDTGMSLDIIPVVDDRRHVTLNVSVYGDITLIEERLQIPSEKTTIIDMDHSKSMPEDIISVQTMPNLVIRSTQVSDDNMKAEEDKYDSILNFSTVEENSFGSGDNLSLTTSIQPSSESVTAGHGPKLVDKDLGSGYAMQFATETLTTTVLNELGIFLPTVPSLVSPHMPHESKESEFEAKHIGRTSTTDDVYEPYTSANNQVITDQSKTMSISGFSGMGQEESGDKKPMIPSLTPDLTMETEKALTTDTFDVSMVTTQSMSQHATVSSSSSEEKHSTVYMQTKSASTEYEETDSVSLNSVSQNPKSSVTVWLVNGVSKYPEVIIPSTSSAKDSDQSDHSSDGTFKEVSSDMAATYKPPTTDLDTTVSSLLVFSPEPESESISTESTPHFNKFVTERSEETESSVNDLIIEENATVSGDSPSIHDYPTAFWNFGERTSTDVPKLSTIEVEFSSERVKNPSQESDRSTERERPRLSSAPVSDSPNSIEVGVFKPDQEAVTMLTSSLEPLDRSLETQSALLGPLLGQQEITTISSNIATNNTAPGNNPYSNEQSTISSELLNTIELVTSSFSLPEVTNGSDFLIGTSVGSVEGTAVQIPGQDPCKSNPCLNGGTCYPRGSFYICTCLPGFNGEQCELDIDECQSNPCRNGATCIDGLNTFTCLCLPSYIGALCEQDTETCDYGWHKFQGQCYKYFAHRRTWDTAERECRLQGAHLTSILSHEEQVFVNRIGHDYQWIGLNDKMFERDFRWTDGSPLQYENWRPNQPDSFFSAGEDCVVIIWHENGQWNDVPCNYHLTYTCKKGTVACGQPPVVENAKTFGKMKPRYEINSLIRYHCKDGFIQRHIPTIRCQGNGRWDMPKITCMNPSTYQRTYSKKYYYKHSSSGKGTSLNSSKHYHRWIRTWQDSRR

SEQ ID NO: 3878 - protein, 65 aa, Carica papaya
MSDTCGNCDCADKTQCVKKGSSYTADIIETEKSIMTVVMDAPAAENDGKCKCGPSCSCTNCTCGH

SEQ ID NO: 3879 - protein, 51 aa, Gallus gallus
MSSHKTFKIKRFLAKKQKQNRPIPQWIRMKTGNKIRYNSKRRHWRRTKLGL

SEQ ID NO: 3880 - protein, 45 aa, Coturnix japonica
MCDKPDLSEVEKFDKKKLKKTNTEEKNTLPSKETIEQEKECVKSS

SEQ ID NO: 3881 - protein, 127 aa, Bos taurus
MDVFKKGFSIAKEGVVGAVEKTKQGVTEAAEKTKEGVMYVGAKTKEGVVQSVTSVAEKTKEQANAVSEAVVSSVNTVATKTVEEVENIAVTSGVVHKEALKQPVPSQEDEAAKAEEQVAEETKSGGD

SEQ ID NO: 3882 - protein, 131 aa, Saccharomyces cerevisiae
  strain ATCC 204508 / S288c
MSEDLSPTSSRVDLSNPHGFTKEGVDLSKLSPQELKLYKMYGKLPSKKDLLRHKMQDRQYFDSGDYALKKAGVIKSDDVIVNNSSNNLPVTNPSGLRESIIRRRMSSSSGGDSISRQGSISSGPPPRSPNK

SEQ ID NO: 3883 - protein, 420 aa, Zea mays; identical to SEQ ID NO: 108

SEQ ID NO: 3884 - protein, 78 aa, Saccharomyces cerevisiae
  strain ATCC 204508 / S288c
MSQNNTISSMNPERAYNNVTLKNLTAFQLLSQRENICELLNLVESTERHNSIINPERQRMSLEEMKKMLDALKNERKK

SEQ ID NO: 3885 - protein, 239 aa, Bos taurus
MSRSNRQKEYKCGDLVFAKMKGYPHWPARIDEMPEAAVKSTANKYQVFFFGTHETAFLGPKDLFPYEESKEKFGKPNKRKGFSEGLWEIENNPTVKASGYQSSQKKSCVEEPEPEPEATEGDGDKKGNAEGSSDEEGKLVIDEPTKEKNEKGALKRRAGDLLEDSPKRPKEAEDLEGEEKEGATLEGERPLPVEAEKNSTPSEPGSGRGPPQEEEEEEEEEEAAKEDAEAPGLRDHESL

SEQ ID NO: 3886 - protein, 138 aa, Cucurbita maxima
MGMGMMEVHLISGKGLQAHDPLNKPIDPYAEINFKGQERMSKVAKNAGPDPIWNEKFKFLVEYPGSGGDFHILFKVMDHDAIDGDDYIGDVKIDVQNLLAEGVRKGWSELPPRMYQVLAHKIYFKGEIEVGVFFQRQG

SEQ ID NO: 3887 - protein, 150 aa, Cucurbita maxima
MGMGMMEVHLISGKGLQAHDPLNKPIDPYAEINFKGQERMSKVAKNAGPNPLWDEKFKFLAEYPGSGGDFHILFKVMDHDAIDGDDYIGDVKIDVKNLLAEGVRKGKSEMPPRMYHVLAHKIHFKGEIEVGVSFKLQGGGGCGGCYPWEN

SEQ ID NO: 3888 - protein, 51 aa, Saccharomyces cerevisiae
  strain ATCC 204508 / S288c
MKMKTNKYMNMVRPAPPRRADPEGVRDPSTMGGGPNPFLRRSPYMYINKKK

SEQ ID NO: 3889 - protein, 3260 aa, Ovis aries; identical to SEQ ID NO: 836

SEQ ID NO: 3890 - protein, 61 aa, Bos taurus
NSPESYLSSKTRSSKLDDNYLKELNEDLKLRKQELLEILKPLEDKNNLLFQKLMSNLEEKQ

SEQ ID NO: 3891 - protein, 51 aa, Saccharomyces cerevisiae
  strain ATCC 204508 / S288c
TNLHMMLPPNHRKTWYALDDFRKDNLKTDEKRINKLFDLDPFKTMVEDRKL

SEQ ID NO: 3892 - protein, 51 aa, Saccharomyces cerevisiae
  strain ATCC 204508 / S288c
KVPEHDQQLNTFEKRYDELFDAQFNKLEFFKIRMKKLKKNKPIEKKNYKIW

SEQ ID NO: 3893 - protein, 56 aa, Saccharomyces cerevisiae
  strain ATCC 204508 / S288c
KVPEHDQQLNTFEKRYDELFDAQFNKLEFFKIRMKKLKKNKPIEKKNYKIWCLEKE

SEQ ID NO: 3894 - protein, 61 aa, Saccharomyces cerevisiae
  strain ATCC 204508 / S288c
KVPEHDQQLNTFEKRYDELFDAQFNKLEFFKIRMKKLKKNKPIEKKNYKIWCLEKEDLKDL

SEQ ID NO: 3895 - protein, 66 aa, Saccharomyces cerevisiae
  strain ATCC 204508 / S288c
KVPEHDQQLNTFEKRYDELFDAQFNKLEFFKIRMKKLKKNKPIEKKNYKIWCLEKEDLKDLVWDPL

SEQ ID NO: 3896 - protein, 51 aa, Gallus gallus
DMEKRVIKWFDYLWTNKKAVDEREVLKYLPDKLRAEIAINVHLETLKKVRI

SEQ ID NO: 3897 - protein, 51 aa, Bos taurus
KDMEKRVIKWFDYLWTNKKTVDEREVLKYLPDKLRAEIAINVHLDTLKKVR

SEQ ID NO: 3898 - protein, 56 aa, Bos taurus
KDMEKRVIKWFDYLWTNKKTVDEREVLKYLPDKLRAEIAINVHLDTLKKVRIFADC

SEQ ID NO: 3899 - protein, 56 aa, Gallus gallus
MHFRKVTKDLEARVIKWFDYLWTNKKTVDEKEVLKNLPDKLKAEIAINVHLDTLKK

SEQ ID NO: 3900 - protein, 51 aa, Bos taurus
WNKTIDAMKRVEEIKQKRQAKFIMNRLKKNKELQKVQDVKEVKQNIHLIRA

SEQ ID NO: 3901 - protein, 51 aa, Bos taurus
EELKNFLKDLLEKANKTVDDTKLAEYTDLMLKLFDSNNDGKLELTEMARLL

SEQ ID NO: 3902 - protein, 51 aa, Bos taurus
LKRRLPTQPSDHSYALLDLDTLKKKLFLTLKENEKLRRRLKAQRLVMRRMC

SEQ ID NO: 3903 - protein, 51 aa, Bos taurus
FKRLQHLLKEKKRRYLHNRKVEHEALGSSLLTGPEGLLAKERENLKRLKCL

SEQ ID NO: 3904 - protein, 66 aa, Oryza sativa
  subsp. japonica
SPLGASAEREREVREAEMLLRAIAERYDDCFLRLRDAAAELSDLHRERLRLAAENLHLSLLLEELE

SEQ ID NO: 3905 - protein, 51 aa, Coturnix japonica
SLNLSSNKLYRLDDLAELAIKAAGLKVLDLSRNELKSERELDKVKGLKLEE

SEQ ID NO: 3906 - protein, 51 aa, Saccharomyces cerevisiae
  strain YJM789
RKDITICLNDLCRINDLLVSHDGLLKREIGSLLRDKQELLELNEREQLLWK

SEQ ID NO: 3907 - protein, 56 aa, Saccharomyces cerevisiae
  strain ATCC 204508 / S288c
VFEELRNSATTLQEDELLLETCENELKRLEEKLTLYKPILKLISDFESLQEDQEFL

SEQ ID NO: 3908 - protein, 56 aa, Solanum demissum
CKDLLLSLLRDAIGEESERRELPDNELADMLRKTLLPRRYLILVDDVWDNSAWDDL

SEQ ID NO: 3909 - protein, 56 aa, Solanum tuberosum
DHVEDKNVETLLERLLEAREELRPLLLKPNNRLKDLLFLDIALDSTVRTAVERGYE

SEQ ID NO: 3910 - DNA, 43 bp, Artificial Sequence
  Description of Artificial Sequence: Synthetic oligonucleotide
cagtggtatcaacgcagagtggccattacggccaagttacggg

SEQ ID NO: 3911 - DNA, 48 bp, Artificial Sequence
  Description of Artificial Sequence: Synthetic oligonucleotide
cagtggtatcaacgcagagtggccgaggcggccttttttttttttttt

SEQ ID NO: 3912 - DNA, 22 bp, Artificial Sequence
  Description of Artificial Sequence: Synthetic primer
tacgtgtatggccgcctcggcc

SEQ ID NO: 3913 - DNA, 22 bp, Artificial Sequence
  Description of Artificial Sequence: Synthetic primer
tacgtgtatggccgtaatggcc

SEQ ID NO: 3914 - protein, 8 aa, Artificial Sequence
  Description of Artificial Sequence: Synthetic peptide
DYKDDDDK

SEQ ID NO: 3915 - protein, 22 aa, Artificial Sequence
  Description of Artificial Sequence: Synthetic peptide
DYKDHDGDYKDHDIDYKDDDDK

SEQ ID NO: 3916 - protein, 20 aa, Artificial Sequence
  Description of Artificial Sequence: Synthetic peptide
MGSSHHHHHHSSGLVPRGSH

SEQ ID NO: 3917 - protein, 11 aa, Artificial Sequence
  Description of Artificial Sequence: Synthetic peptide
MGSHHHHHHHH

SEQ ID NO: 3918 - protein, 19 aa, Artificial Sequence
  Description of Artificial Sequence: Synthetic peptide
MGSHHHHHHHHSENLYFQG

SEQ ID NO: 3919 - protein, 8 aa, Artificial Sequence
  Description of Artificial Sequence: Synthetic 8xHis tag
HHHHHHHH

SEQ ID NO: 3920 - DNA, 57 bp, Artificial Sequence
  Description of Artificial Sequence: Synthetic oligonucleotide
atgaaaaagatttggctggcgctggctggtttagttttagcgtttagcgcatcggcg

SEQ ID NO: 3921 - protein, 32 aa, Bacillus subtilis
MKKKKTWKRFLHFSSAALAAGLIFTSAAPAEA

SEQ ID NO: 3922 - protein, 29 aa, Bacillus subtilis
MKRSISIFITCLLITLLTMGGMIASPASA

SEQ ID NO: 3923 - protein, 30 aa, Bacillus subtilis
MRKKTKNRLISSVLSTVVISSLLFPGAAGA

SEQ ID NO: 3924 - protein, 26 aa, Bacillus subtilis
MRKNRILALFVLSLGLLSFMVTPVSA

SEQ ID NO: 3925 - protein, 32 aa, Bacillus subtilis
MKFVKRRIIALVTILMLSVTSLFALQPSAKAA

SEQ ID NO: 3926 - protein, 25 aa, Bacillus subtilis
MKSCKQLIVCSLAAILLLIPSVSFA

SEQ ID NO: 3927 - protein, 26 aa, Bacillus subtilis
MKKKLAAGLTASAIVGTTLVVTPAEA

SEQ ID NO: 3928 - protein, 34 aa, Bacillus subtilis
MKLVPRFRKQWFAYLTVLCLALAAAVSFGVPAKA

SEQ ID NO: 3929 - protein, 28 aa, Bacillus subtilis
MRNLTKTSLLLAGLCTAAQMVFVTHASA

SEQ ID NO: 3930 - protein, 24 aa, Bacillus subtilis
MKRLCLWFTVFSLFLVLLPGKALG

SEQ ID NO: 3931 - protein, 36 aa, Bacillus subtilis
MKLKTKASIKFGICVGLLCLSITGFTPFFNSTHAEA

SEQ ID NO: 3932 - protein, 32 aa, Bacillus subtilis
MKKFPKKLLPIAVLSSIAFSSLASGSVPEASA

SEQ ID NO: 3933 - protein, 32 aa, Bacillus subtilis
MKKRKRRNFKRFIAAFLVLALMISLVPADVLA

SEQ ID NO: 3934 - protein, 28 aa, Bacillus subtilis
MFKFKKNFLVGLSAALMSISLFSATASA

SEQ ID NO: 3935 - protein, 28 aa, Bacillus subtilis
MKRMIVRMTLPLLIVCLAFSSFSASARA

SEQ ID NO: 3936 - protein, 26 aa, Bacillus subtilis
MKRITINIITMFIAAAVISLTGTAEA

SEQ ID NO: 3937 - protein, 28 aa, Bacillus subtilis
MRKKRVITCVMAASLTLGSLLPAGYASA

SEQ ID NO: 3938 - protein, 29 aa, Bacillus subtilis
MKKKQVMLALTAAAGLGLTALHSAPAAKA

SEQ ID NO: 3939 - protein, 21 aa, Bacillus subtilis
MKWMCSICCAAVLLAGGAAQA

SEQ ID NO: 3940 - protein, 26 aa, Bacillus subtilis
MKKELLASLVLCLSLSPLVSTNEVFA

SEQ ID NO: 3941 - protein, 26 aa, Bacillus subtilis
MNFKKTVVSALSISALALSVSGVASA

SEQ ID NO: 3942 - protein, 28 aa, Bacillus subtilis
MKRLFMKASLVLFAVVFVFAVKGAPAKA

SEQ ID NO: 3943 - protein, 26 aa, Bacillus subtilis
MLKKKWMVGLLAGCLAAGGFSYNAFA

SEQ ID NO: 3944 - protein, 27 aa, Bacillus subtilis
MKKIGLLFMLCLAALFTIGFPAQQADA

SEQ ID NO: 3945 - protein, 25 aa, Bacillus subtilis
MRFTKVVGFLSVLGLAAVFPLTAQA

SEQ ID NO: 3946 - protein, 28 aa, Bacillus subtilis
MKQGKFSVFLILLLMLTLVVAPKGKAEA

SEQ ID NO: 3947 - protein, 28 aa, Bacillus subtilis
MTLTKLKMLSMLTVMIASLFIFSSQALA

SEQ ID NO: 3948 - protein, 30 aa, Bacillus subtilis
MKRKLLSSLAISALSLGLLVSAPTASFAAE

SEQ ID NO: 3949 - protein, 28 aa, Bacillus subtilis
MTKKAWFLPLVCVLLISGWLAPAASASA

SEQ ID NO: 3950 - protein, 30 aa, Bacillus subtilis
MRKSLITLGLASVIGTSSFLIPFTSKTASA

SEQ ID NO: 3951 - protein, 26 aa, Bacillus subtilis
MKRIRIPMTLALGAALTIAPLSFASA

SEQ ID NO: 3952 - protein, 21 aa, Bacillus subtilis
MRKYTVIASILLSFLSVLSGG

SEQ ID NO: 3953 - protein, 31 aa, Bacillus subtilis
MKKLLTVMTMAVLTAGTLLLPAQSVTPAAHA

SEQ ID NO: 3954 - protein, 30 aa, Bacillus subtilis
MNKPTKLFSTLALAAGMTAAAAGGAGTIHA

SEQ ID NO: 3955 - protein, 41 aa, Bacillus subtilis
MVKSFRMKALIAGAAVAAAVSAGAVSDVPAAKVLQPTAAYA

SEQ ID NO: 3956 - protein, 32 aa, Bacillus subtilis
MKWNNMLKAAGIAVLLFSVFAYAAPSLKAVQA

SEQ ID NO: 3957 - protein, 16 aa, Aspergillus sp.
MRWLLTSSALLVPAAA

SEQ ID NO: 3958 - protein, 26 aa, Aspergillus sp.
MKFLKAKGSLLSSGIYLIALAPFVNA

SEQ ID NO: 3959 - protein, 23 aa, Aspergillus sp.
MNFKNIFLSFFFVLAVGLALVHA

SEQ ID NO: 3960 - protein, 21 aa, Aspergillus sp.
MKQFSAKYALILLATAGQALA

SEQ ID NO: 3961 - protein, 19 aa, Aspergillus sp.
MKLSSACAIALLAAQAAGA

SEQ ID NO: 3962 - protein, 20 aa, Aspergillus sp.
MKYSTIFSAAAAVFAGSAAA

SEQ ID NO: 3963 - protein, 18 aa, Aspergillus sp.
MKFSTILTGSLFATAALA

SEQ ID NO: 3964 - protein, 22 aa, Aspergillus sp.
MIGSSHAVVALGLFTLYGHSAA

SEQ ID NO: 3965 - protein, 19 aa, Aspergillus sp.
MPRTSLLTLACALATGASA

SEQ ID NO: 3966 - protein, 22 aa, Aspergillus sp.
MRPLSHLSFFNGLLLGLSALSA

SEQ ID NO: 3967 - protein, 18 aa, Aspergillus sp.
MGALRWLSIAATASTALA

SEQ ID NO: 3968 - protein, 23 aa, Aspergillus sp.
MGVSAVLLPLYLLSGVTSGLAVP

SEQ ID NO: 3969 - protein, 14 aa, Aspergillus sp.
MLPLLLCIVPYCWS

SEQ ID NO: 3970 - protein, 18 aa, Aspergillus sp.
MHFLQNAVVAATMGAALA

SEQ ID NO: 3971 - protein, 20 aa, Aspergillus sp.
MKGTAASALLIALSATAAQA

SEQ ID NO: 3972 - protein, 16 aa, Aspergillus sp.
MKGILGLSLLPLLTAA

SEQ ID NO: 3973 - protein, 18 aa, Aspergillus sp.
MKFSTILTGSLFATAALA

SEQ ID NO: 3974 - protein, 22 aa, Aspergillus sp.
MIGSSHAVVALGLFTLYGHSAA

SEQ ID NO: 3975 - protein, 26 aa, Aspergillus sp.
MMYSKLLTLTTLLLPTALALPSLVER

SEQ ID NO: 3976 - protein, 18 aa, Aspergillus sp.
MHSYQLLGLAAVGSLVSA

SEQ ID NO: 3977 - protein, 21 aa, Aspergillus sp.
MQSIKRTLLLLGAILPAVLGA

SEQ ID NO: 3978 - protein, 20 aa, Aspergillus sp.
MHYKLLFAAAAASLASAVSA

SEQ ID NO: 3979 - protein, 20 aa, Aspergillus sp.
MPRLLPISAATLALAQLTYG

SEQ ID NO: 3980 - protein, 19 aa, Aspergillus sp.
MPRTSLLTLACALATGASA

SEQ ID NO: 3981 - protein, 18 aa, Aspergillus sp.
MRQHSRMAVAALAAGANA

SEQ ID NO: 3982 - protein, 20 aa, Aspergillus sp.
MRSFAPWLVSLLGASAVVAA

SEQ ID NO: 3983 - protein, 18 aa, Aspergillus sp.
MLTKNLLLCFAAAKAALA

SEQ ID NO: 3984 - protein, 19 aa, Aspergillus sp.
MAVLSVLLPITFLLSSVTG

SEQ ID NO: 3985 - protein, 18 aa, Aspergillus sp.
MGALRWLSIAATASTALA

SEQ ID NO: 3986 - protein, 23 aa, Aspergillus sp.
MGVSAVLLPLYLLSGVTSGLAVP

SEQ ID NO: 3987 - protein, 20 aa, Aspergillus sp.
MVVFSKTAALVLGLSTAVSA

SEQ ID NO: 3988 - protein, 25 aa, Aspergillus sp.
MVKLTHLLARAWLVPLAYGASQSLL

SEQ ID NO: 3989 - protein, 25 aa, Aspergillus sp.
MVAFSALSGVSAVSLLLSLVQNAHG

SEQ ID NO: 3990 - protein, 18 aa, Aspergillus sp.
MSFRSLLALSGLVCTGLA

SEQ ID NO: 3991 - protein, 19 aa, Aspergillus sp.
MFTKQSLVTLLGGLSLAVA

SEQ ID NO: 3992 - protein, 18 aa, Aspergillus sp.
MFSRRNLVALGLAATVSA

SEQ ID NO: 3993 - protein, 6 aa, Unknown
  Description of Unknown: Kexin protease site peptide
NVISKR

SEQ ID NO: 3994 - protein, 21 aa, Unknown
  Description of Unknown: Ig-Kappa peptide
METDTLLLWVLLLWVPGSTGD

SEQ ID NO: 3995 - protein, 11 aa, Artificial Sequence
  Description of Artificial Sequence: Synthetic peptide
LFDKDNNGSIS

SEQ ID NO: 3996 - protein, 8 aa, Artificial Sequence
  Description of Artificial Sequence: Synthetic peptide
FDKDNNGS

SEQ ID NO: 3997 - protein, 10 aa, Artificial Sequence
  Description of Artificial Sequence: Synthetic peptide
FDKDNNGSIS

SEQ ID NO: 3998 - protein, 11 aa, Artificial Sequence
  Description of Artificial Sequence: Synthetic peptide
FDKDNNGSISS

SEQ ID NO: 3999 - protein, 14 aa, Artificial Sequence
  Description of Artificial Sequence: Synthetic peptide
FDKDNNGSISSSEL

SEQ ID NO: 4000 - protein, 8 aa, Artificial Sequence
  Description of Artificial Sequence: Synthetic peptide
DKDNNGSI

SEQ ID NO: 4001 - protein, 9 aa, Artificial Sequence
  Description of Artificial Sequence: Synthetic peptide
DKDNNGSIS

SEQ ID NO: 4002 - protein, 8 aa, Artificial Sequence
  Description of Artificial Sequence: Synthetic peptide
SLGLSPSE

SEQ ID NO: 4003 - protein, 8 aa, Artificial Sequence
  Description of Artificial Sequence: Synthetic peptide
NEIDVDGN

SEQ ID NO: 4004 - protein, 7 aa, Artificial Sequence
  Description of Artificial Sequence: Synthetic peptide
IDVDGNH

SEQ ID NO: 4005 - protein, 8 aa, Artificial Sequence
  Description of Artificial Sequence: Synthetic peptide
IDVDGNHQ

SEQ ID NO: 4006 - protein, 10 aa, Artificial Sequence
  Description of Artificial Sequence: Synthetic peptide
IDVDGNHQIE

SEQ ID NO: 4007 - protein, 9 aa, Artificial Sequence
  Description of Artificial Sequence: Synthetic peptide
KVFDKNGDG

SEQ ID NO: 4008 - protein, 11 aa, Artificial Sequence
  Description of Artificial Sequence: Synthetic peptide
VFDKNGDGLIS

SEQ ID NO: 4009 - protein, 7 aa, Artificial Sequence
  Description of Artificial Sequence: Synthetic peptide
DKNGDGL

SEQ ID NO: 4010 - protein, 7 aa, Artificial Sequence
  Description of Artificial Sequence: Synthetic peptide
KLTDAEV

SEQ ID NO: 4011 - protein, 16 aa, Artificial Sequence
  Description of Artificial Sequence: Synthetic peptide
LREVSDGSGEINIQQF

SEQ ID NO: 4012 - protein, 8 aa, Artificial Sequence
  Description of Artificial Sequence: Synthetic peptide
REVSDGSG

SEQ ID NO: 4013 - protein, 9 aa, Artificial Sequence
  Description of Artificial Sequence: Synthetic peptide
REVSDGSGE

SEQ ID NO: 4014 - protein, 10 aa, Artificial Sequence
  Description of Artificial Sequence: Synthetic peptide
REVSDGSGEI

SEQ ID NO: 4015 - protein, 11 aa, Artificial Sequence
  Description of Artificial Sequence: Synthetic peptide
REVSDGSGEIN

SEQ ID NO: 4016 - protein, 13 aa, Artificial Sequence
  Description of Artificial Sequence: Synthetic peptide
REVSDGSGEINIQ

SEQ ID NO: 4017 - protein, 15 aa, Artificial Sequence
  Description of Artificial Sequence: Synthetic peptide
REVSDGSGEINIQQF

SEQ ID NO: 4018 - protein, 9 aa, Artificial Sequence
  Description of Artificial Sequence: Synthetic peptide
EVSDGSGEI

SEQ ID NO: 4019 - protein, 10 aa, Artificial Sequence
  Description of Artificial Sequence: Synthetic peptide
EVSDGSGEIN

SEQ ID NO: 4020 - protein, 12 aa, Artificial Sequence
  Description of Artificial Sequence: Synthetic peptide
YSFEDSGVGDVT

SEQ ID NO: 4021 - protein, 13 aa, Artificial Sequence
  Description of Artificial Sequence: Synthetic peptide
YSFEDSGVGDVTG

SEQ ID NO: 4022 - protein, 12 aa, Artificial Sequence
  Description of Artificial Sequence: Synthetic peptide
SFEDSGVGDVTG

SEQ ID NO: 4023 - protein, 9 aa, Artificial Sequence
  Description of Artificial Sequence: Synthetic peptide
FEDSGVGDV

SEQ ID NO: 4024 - protein, 9 aa, Artificial Sequence
  Description of Artificial Sequence: Synthetic peptide
EDSGVGDVT

SEQ ID NO: 4025 - protein, 10 aa, Artificial Sequence
  Description of Artificial Sequence: Synthetic peptide
EDSGVGDVTG

SEQ ID NO: 4026 - protein, 11 aa, Artificial Sequence
  Description of Artificial Sequence: Synthetic peptide
EDSGVGDVTGF

SEQ ID NO: 4027 - protein, 8 aa, Artificial Sequence
  Description of Artificial Sequence: Synthetic peptide
DSGVGDVT

SEQ ID NO: 4028 - protein, 7 aa, Artificial Sequence
  Description of Artificial Sequence: Synthetic peptide
  MOD_RES (4)..(4): D-amino acid
LRGNGYD

SEQ ID NO: 4029 - protein, 10 aa, Artificial Sequence
  Description of Artificial Sequence: Synthetic peptide
  MOD_RES (4)..(4): D-amino acid
LRGNGYDIDV

SEQ ID NO: 4030 - protein, 10 aa, Artificial Sequence
  Description of Artificial Sequence: Synthetic peptide
ITHTNDIVPR

SEQ ID NO: 4031 - protein, 8 aa, Artificial Sequence
  Description of Artificial Sequence: Synthetic peptide
HTNDIVPR

SEQ ID NO: 4032 - protein, 7 aa, Artificial Sequence
  Description of Artificial Sequence: Synthetic peptide
TNDIVPR

SEQ ID NO: 4033 - protein, 6 aa, Artificial Sequence
  Description of Artificial Sequence: Synthetic peptide
NDIVPR

SEQ ID NO: 4034 - protein, 7 aa, Artificial Sequence
  Description of Artificial Sequence: Synthetic peptide
YSHSSPE

SEQ ID NO: 4035 - protein, 26 aa, Artificial Sequence
  Description of Artificial Sequence: Synthetic peptide
DIVKIEGIDATGGNNQPNIPDIPAHL

SEQ ID NO: 4036 - protein, 6 aa, Artificial Sequence
  Description of Artificial Sequence: Synthetic peptide
KIEGID

SEQ ID NO: 4037 - protein, 21 aa, Artificial Sequence
  Description of Artificial Sequence: Synthetic peptide
KIEGIDATGGNNQPNIPDIPA

SEQ ID NO: 4038 - protein, 20 aa, Artificial Sequence
  Description of Artificial Sequence: Synthetic peptide
IEGIDATGGNNQPNIPDIPA

SEQ ID NO: 4039 - protein, 19 aa, Artificial Sequence
  Description of Artificial Sequence: Synthetic peptide
EGIDATGGNNQPNIPDIPA

SEQ ID NO: 4040 - protein, 18 aa, Artificial Sequence
  Description of Artificial Sequence: Synthetic peptide
GIDATGGNNQPNIPDIPA

SEQ ID NO: 4041 - protein, 14 aa, Artificial Sequence
  Description of Artificial Sequence: Synthetic peptide
IDATGGNNQPNIPD

SEQ ID NO: 4042 - protein, 16 aa, Artificial Sequence
  Description of Artificial Sequence: Synthetic peptide
IDATGGNNQPNIPDIP

SEQ ID NO: 4043 - protein, 17 aa, Artificial Sequence
  Description of Artificial Sequence: Synthetic peptide
IDATGGNNQPNIPDIPA

SEQ ID NO: 4044 - protein, 18 aa, Artificial Sequence
  Description of Artificial Sequence: Synthetic peptide
IDATGGNNQPNIPDIPAH

SEQ ID NO: 4045 - protein, 16 aa, Artificial Sequence
  Description of Artificial Sequence: Synthetic peptide
DATGGNNQPNIPDIPA

SEQ ID NO: 4046 - protein, 12 aa, Artificial Sequence
  Description of Artificial Sequence: Synthetic peptide
ATGGNNQPNIPD

SEQ ID NO: 4047 - protein, 14 aa, Artificial Sequence
  Description of Artificial Sequence: Synthetic peptide
ATGGNNQPNIPDIP

SEQ ID NO: 4048 - protein, 15 aa, Artificial Sequence
  Description of Artificial Sequence: Synthetic peptide
ATGGNNQPNIPDIPA

SEQ ID NO: 4049 - protein, 16 aa, Artificial Sequence
  Description of Artificial Sequence: Synthetic peptide
ATGGNNQPNIPDIPAH

SEQ ID NO: 4050 - protein, 14 aa, Artificial Sequence
  Description of Artificial Sequence: Synthetic peptide
TGGNNQPNIPDIPA

SEQ ID NO: 4051 - protein, 12 aa, Artificial Sequence
  Description of Artificial Sequence: Synthetic peptide
GGNNQPNIPDIP

SEQ ID NO: 4052 - protein, 13 aa, Artificial Sequence
  Description of Artificial Sequence: Synthetic peptide
GGNNQPNIPDIPA

SEQ ID NO: 4053 - protein, 12 aa, Artificial Sequence
  Description of Artificial Sequence: Synthetic peptide
GNNQPNIPDIPA

SEQ ID NO: 4054 - protein, 11 aa, Artificial Sequence
  Description of Artificial Sequence: Synthetic peptide
NNQPNIPDIPA

SEQ ID NO: 4055 - protein, 10 aa, Artificial Sequence
  Description of Artificial Sequence: Synthetic peptide
NQPNIPDIPA

SEQ ID NO: 4056 - protein, 8 aa, Artificial Sequence
  Description of Artificial Sequence: Synthetic peptide
PNIPDIPA

SEQ ID NO: 4057 - DNA, 44 bp, Artificial Sequence
  Description of Artificial Sequence: Synthetic oligonucleotide
atcaccaccatcaccatcatagcagcagcgaaagcattcgtatg

SEQ ID NO: 4058 - DNA, 47 bp, Artificial Sequence
  Description of Artificial Sequence: Synthetic oligonucleotide
tgttagcagccggatccttaatctttgcccagtttattcagaatatc

SEQ ID NO: 4059 - DNA, 48 bp, Artificial Sequence
  Description of Artificial Sequence: Synthetic primer
ggaatggtacgcggaaaaccaaacagaataaagccatttttgcatgcc

SEQ ID NO: 4060 - DNA, 48 bp, Artificial Sequence
  Description of Artificial Sequence: Synthetic primer
ggaatggtacgcggaaaaccaatcagaataaagccatttttgcatgcc

SEQ ID NO: 4061 - DNA, 44 bp, Artificial Sequence
  Description of Artificial Sequence: Synthetic primer
ccgcttgccggatgaatcagcataccggtaatacgtgcaaccag

SEQ ID NO: 4062 - DNA, 44 bp, Artificial Sequence
  Description of Artificial Sequence: Synthetic primer
ccgcttgccggatgaatcagataaccggtaatacgtgcaaccag

SEQ ID NO: 4063 - DNA, 44 bp, Artificial Sequence
  Description of Artificial Sequence: Synthetic primer
gtaccttttgcaatctggcttgccagcatatcaccggttgccag

SEQ ID NO: 4064 - DNA, 44 bp, Artificial Sequence
  Description of Artificial Sequence: Synthetic primer
gtaccttttgcaatctggctacacagcatatcaccggttgccag

SEQ ID NO: 4065 - DNA, 44 bp, Artificial Sequence
  Description of Artificial Sequence: Synthetic primer
gtaccttttgcaatctggctacccagcatatcaccggttgccag

SEQ ID NO: 4066 - DNA, 44 bp, Artificial Sequence
  Description of Artificial Sequence: Synthetic primer
gtaccttttgcaatctggctaatcagcatatcaccggttgccag

SEQ ID NO: 4067 - DNA, 44 bp, Artificial Sequence
  Description of Artificial Sequence: Synthetic primer
gtaccttttgcaatctggcttttcagcatatcaccggttgccag

SEQ ID NO: 4068 - DNA, 44 bp, Artificial Sequence
  Description of Artificial Sequence: Synthetic primer
gtaccttttgcaatctggctcagcagcatatcaccggttgccag

SEQ ID NO: 4069 - DNA, 44 bp, Artificial Sequence
  Description of Artificial Sequence: Synthetic primer
gtaccttttgcaatctggctctgcagcatatcaccggttgccag

SEQ ID NO: 4070 - DNA, 44 bp, Artificial Sequence
  Description of Artificial Sequence: Synthetic primer
gtaccttttgcaatctggctggtcagcatatcaccggttgccag

SEQ ID NO: 4071 - DNA, 44 bp, Artificial Sequence
  Description of Artificial Sequence: Synthetic primer
gtaccttttgcaatctggctaaccagcatatcaccggttgccag

SEQ ID NO: 4072 - DNA, 20 bp, Artificial Sequence
  Description of Artificial Sequence: Synthetic primer
ggttttccgcgtaccattcc

SEQ ID NO: 4073 - DNA, 19 bp, Artificial Sequence
  Description of Artificial Sequence: Synthetic primer
ctgattcatccggcaagcg

SEQ ID NO: 4074 - DNA, 22 bp, Artificial Sequence
  Description of Artificial Sequence: Synthetic primer
agccagattgcaaaaggtacac

SEQ ID NO: 4075 - DNA, 22 bp, Artificial Sequence
  Description of Artificial Sequence: Synthetic primer
ggatccggctgctaacaaagcc

SEQ ID NO: 4076 - DNA, 26 bp, Artificial Sequence
  Description of Artificial Sequence: Synthetic primer
atgatggtgatggtggtgatgatgac

SEQ ID NO: 4077 - DNA, 70 bp, Artificial Sequence
  Description of Artificial Sequence: Synthetic primer
  modified_base (26)..(26): a, c, t, g, unknown or other
  modified_base (28)..(29): a, c, t, g, unknown or other
  modified_base (31)..(31): a, c, t, g, unknown or other
  modified_base (35)..(35): a, c, t, g, unknown or other
  modified_base (37)..(38): a, c, t, g, unknown or other
  modified_base (40)..(40): a, c, t, g, unknown or other
ggtcatcaatcataccaccagtgatntnntnggcntnntntccaatgaggttaagagtattccaaactgg

SEQ ID NO: 4078 - DNA, 62 bp, Artificial Sequence
  Description of Artificial Sequence: Synthetic primer
  modified_base (27)..(27): a, c, t, g, unknown or other
  modified_base (29)..(29): a, c, t, g, unknown or other
  modified_base (31)..(32): a, c, t, g, unknown or other
  modified_base (34)..(34): a, c, t, g, unknown or other
  modified_base (36)..(36): a, c, t, g, unknown or other
cagtcaattttggccgaatatcacaanrntnntnanrgagttccaatacggagaaatcctgc

SEQ ID NO: 4079 - DNA, 66 bp, Artificial Sequence
  Description of Artificial Sequence: Synthetic primer
  modified_base (26)..(26): a, c, t, g, unknown or other
  modified_base (28)..(28): a, c, t, g, unknown or other
  modified_base (30)..(30): a, c, t, g, unknown or other
  modified_base (35)..(35): a, c, t, g, unknown or other
  modified_base (37)..(38): a, c, t, g, unknown or other
  modified_base (40)..(40): a, c, t, g, unknown or other
  modified_base (42)..(42): a, c, t, g, unknown or other
tcgtaatctgggcgtgtcgaatatcntnanrtatntnntnanrgtgtctgcggacaagctagtgac

SEQ ID NO: 4080 - DNA, 56 bp, Artificial Sequence
  Description of Artificial Sequence: Synthetic primer
  modified_base (24)..(24): a, c, t, g, unknown or other
  modified_base (26)..(26): a, c, t, g, unknown or other
  modified_base (31)..(31): a, c, t, g, unknown or other
  modified_base (34)..(34): a, c, t, g, unknown or other
gatttcacaatgtgatggctggantncctanranrctctcgaacccgaatggaaac

SEQ ID NO: 4081 - DNA, 23 bp, Artificial Sequence
  Description of Artificial Sequence: Synthetic primer
ggtcatcaatcataccaccagtg

SEQ ID NO: 4082 - DNA, 24 bp, Artificial Sequence
  Description of Artificial Sequence: Synthetic primer
cagtcaattttggccgaatatcac

SEQ ID NO: 4083 - DNA, 19 bp, Artificial Sequence
  Description of Artificial Sequence: Synthetic primer
tcgtaatctgggcgtgtcg

SEQ ID NO: 4084 - DNA, 22 bp, Artificial Sequence
  Description of Artificial Sequence: Synthetic primer
gatttcacaatgtgatggctgg

SEQ ID NO: 4085 - DNA, 25 bp, Artificial Sequence
  Description of Artificial Sequence: Synthetic primer
tgtgatattcggccaaaattgactg

SEQ ID NO: 4086 - DNA, 24 bp, Artificial Sequence
  Description of Artificial Sequence: Synthetic primer
gatattcgacacgcccagattacg

SEQ ID NO: 4087 - DNA, 23 bp, Artificial Sequence
  Description of Artificial Sequence: Synthetic primer
tccagccatcacattgtgaaatc

SEQ ID NO: 4088 - DNA, 24 bp, Artificial Sequence
  Description of Artificial Sequence: Synthetic primer
atctgcacgcaaggtaatcgtcag

SEQ ID NO: 4089 - DNA, 22 bp, Artificial Sequence
  Description of Artificial Sequence: Synthetic primer
ctgacgattaccttgcgtgcag

SEQ ID NO: 4090 - DNA, 23 bp, Artificial Sequence
  Description of Artificial Sequence: Synthetic primer
cactggtggtatgattgatgacc

SEQ ID NO: 4091 - DNA, 70 bp, Artificial Sequence
  Description of Artificial Sequence: Synthetic primer
ggtcatcaatcataccaccagtgatcttctgggccttctgtccaatgaggttaagagtattccaaactgg

SEQ ID NO: 4092 - DNA, 70 bp, Artificial Sequence
  Description of Artificial Sequence: Synthetic primer
ggtcatcaatcataccaccagtgatattatcggcattatctccaatgaggttaagagtattccaaactgg

SEQ ID NO: 4093 - DNA, 70 bp, Artificial Sequence
  Description of Artificial Sequence: Synthetic primer
ggtcatcaatcataccaccagtgatgttgtgggcgttgtgtccaatgaggttaagagtattccaaactgg

SEQ ID NO: 4094 - DNA, 70 bp, Artificial Sequence
  Description of Artificial Sequence: Synthetic primer
ggtcatcaatcataccaccagtgattttttcggctttttctccaatgaggttaagagtattccaaactgg

SEQ ID NO: 4095 - DNA, 70 bp, Artificial Sequence
  Description of Artificial Sequence: Synthetic primer
ggtcatcaatcataccaccagtgattggtggggatggtggtccaatgaggttaagagtattccaaactgg

SEQ ID NO: 4096 - DNA, 70 bp, Artificial Sequence
  Description of Artificial Sequence: Synthetic primer
ggtcatcaatcataccaccagtgatatgatgggcatgatgtccaatgaggttaagagtattccaaactgg

SEQ ID NO: 4097 - DNA, 70 bp, Artificial Sequence
  Description of Artificial Sequence: Synthetic primer
ggtcatcaatcataccaccagtgatacaacgggcacaacgtccaatgaggttaagagtattccaaactgg

SEQ ID NO: 4098 - DNA, 70 bp, Artificial Sequence
  Description of Artificial Sequence: Synthetic primer
ggtcatcaatcataccaccagtgattataagaaaggcaagaaaaatgaggttaagagtattccaaactgg

SEQ ID NO: 4099 - DNA, 70 bp, Artificial Sequence
  Description of Artificial Sequence: Synthetic primer
ggtcatcaatcataccaccagtgattatcatcatggccatcacaatgaggttaagagtattccaaactgg

SEQ ID NO: 4100 - DNA, 62 bp, Artificial Sequence
  Description of Artificial Sequence: Synthetic primer
cagtcaattttggccgaatatcacaaagcttctgggcgagttccaatacggagaaatcctgc

SEQ ID NO: 4101 - DNA, 62 bp, Artificial Sequence
  Description of Artificial Sequence: Synthetic primer
cagtcaattttggccgaatatcacaaagattatcggcgagttccaatacggagaaatcctgc

SEQ ID NO: 4102 - DNA, 62 bp, Artificial Sequence
  Description of Artificial Sequence: Synthetic primer
cagtcaattttggccgaatatcacaaaggttgtgggcgagttccaatacggagaaatcctgc

SEQ ID NO: 4103 - DNA, 62 bp, Artificial Sequence
  Description of Artificial Sequence: Synthetic primer
cagtcaattttggccgaatatcacaaagttctttggcgagttccaatacggagaaatcctgc

SEQ ID NO: 4104 - DNA, 62 bp, Artificial Sequence
  Description of Artificial Sequence: Synthetic primer
cagtcaattttggccgaatatcacaaagtggtggggcgagttccaatacggagaaatcctgc

SEQ ID NO: 4105 - DNA, 62 bp, Artificial Sequence
  Description of Artificial Sequence: Synthetic primer
cagtcaattttggccgaatatcacaaagatgatgggcgagttccaatacggagaaatcctgc

SEQ ID NO: 4106 - DNA, 62 bp, Artificial Sequence
  Description of Artificial Sequence: Synthetic primer
cagtcaattttggccgaatatcacaaagacgacaggcgagttccaatacggagaaatcctgc

SEQ ID NO: 4107 - DNA, 62 bp, Artificial Sequence
  Description of Artificial Sequence: Synthetic primer
cagtcaattttggccgaatatcacaaagaaaggagcagagttccaatacggagaaatcctgc

SEQ ID NO: 4108 - DNA, 62 bp, Artificial Sequence
  Description of Artificial Sequence: Synthetic primer
cagtcaattttggccgaatatcacacatcatggagcagagttccaatacggagaaatcctgc

SEQ ID NO: 4109 - DNA, 66 bp, Artificial Sequence
  Description of Artificial Sequence: Synthetic primer
tcgtaatctgggcgtgtcgaatatccttcactatcttctggatgtgtctgcggacaagctagtgac

SEQ ID NO: 4110 - DNA, 66 bp, Artificial Sequence
  Description of Artificial Sequence: Synthetic primer
tcgtaatctgggcgtgtcgaatatcattcactatatcattgatgtgtctgcggacaagctagtgac

SEQ ID NO: 4111 - DNA, 66 bp, Artificial Sequence
  Description of Artificial Sequence: Synthetic primer
tcgtaatctgggcgtgtcgaatatcgttcactatgttgtggatgtgtctgcggacaagctagtgac

SEQ ID NO: 4112 - DNA, 66 bp, Artificial Sequence
  Description of Artificial Sequence: Synthetic primer
tcgtaatctgggcgtgtcgaatatcttccactatttctttgatgtgtctgcggacaagctagtgac

SEQ ID NO: 4113 - DNA, 66 bp, Artificial Sequence
  Description of Artificial Sequence: Synthetic primer
tcgtaatctgggcgtgtcgaatatctggcactattggtgggatgtgtctgcggacaagctagtgac

SEQ ID NO: 4114 - DNA, 66 bp, Artificial Sequence
  Description of Artificial Sequence: Synthetic primer
tcgtaatctgggcgtgtcgaatatcatgcactatatgatggatgtgtctgcggacaagctagtgac

SEQ ID NO: 4115 - DNA, 66 bp, Artificial Sequence
  Description of Artificial Sequence: Synthetic primer
tcgtaatctgggcgtgtcgaatatcacacactatacaacggatgtgtctgcggacaagctagtgac

SEQ ID NO: 4116 - DNA, 66 bp, Artificial Sequence
  Description of Artificial Sequence: Synthetic primer
tcgtaatctgggcgtgtcgaatatctccaagtataaagcaaaggtgtctgcggacaagctagtgac

SEQ ID NO: 4117 - DNA, 66 bp, Artificial Sequence
  Description of Artificial Sequence: Synthetic primer
tcgtaatctgggcgtgtcgaatatctcccattatcacgcacatgtgtctgcggacaagctagtgac

SEQ ID NO: 4118 - DNA, 56 bp, Artificial Sequence
  Description of Artificial Sequence: Synthetic primer
gatttcacaatgtgatggctggacttcctgaggaactctcgaacccgaatggaaac

SEQ ID NO: 4119 - DNA, 56 bp, Artificial Sequence
  Description of Artificial Sequence: Synthetic primer
gatttcacaatgtgatggctggaattcctgaggaactctcgaacccgaatggaaac

SEQ ID NO: 4120 - DNA, 56 bp, Artificial Sequence
  Description of Artificial Sequence: Synthetic primer
gatttcacaatgtgatggctggagttcctgaggaactctcgaacccgaatggaaac

SEQ ID NO: 4121 - DNA, 56 bp, Artificial Sequence
  Description of Artificial Sequence: Synthetic primer
gatttcacaatgtgatggctggattccctgaggaactctcgaacccgaatggaaac

SEQ ID NO: 4122 - DNA, 56 bp, Artificial Sequence
  Description of Artificial Sequence: Synthetic primer
gatttcacaatgtgatggctggatggcctgaggaactctcgaacccgaatggaaac

SEQ ID NO: 4123 - DNA, 56 bp, Artificial Sequence
  Description of Artificial Sequence: Synthetic primer
gatttcacaatgtgatggctggaatgcctgaggaactctcgaacccgaatggaaac

SEQ ID NO: 4124 - DNA, 56 bp, Artificial Sequence
  Description of Artificial Sequence: Synthetic primer
gatttcacaatgtgatggctggaacacctgaggaactctcgaacccgaatggaaac

SEQ ID NO: 4125 - DNA, 56 bp, Artificial Sequence
  Description of Artificial Sequence: Synthetic primer
gatttcacaatgtgatggctggaaagcctgaggaactctcgaacccgaatggaaac

SEQ ID NO: 4126 - DNA, 56 bp, Artificial Sequence
  Description of Artificial Sequence: Synthetic primer
gatttcacaatgtgatggctggacatcctgaggaactctcgaacccgaatggaaac

SEQ ID NO: 4127 - DNA, 22 bp, Artificial Sequence
  Description of Artificial Sequence: Synthetic primer
cttgaaattggaagggagattc

SEQ ID NO: 4128 - DNA, 23 bp, Artificial Sequence
  Description of Artificial Sequence: Synthetic primer
gtataaacttttcagttgcagac

SEQ ID NO: 4129 - protein, 6 aa, Artificial Sequence
  Description of Artificial Sequence: Synthetic 6xHis tag
HHHHHH

SEQ ID NO: 4130 - protein, 4 aa, Bacillus subtilis
YAAI

SEQ ID NO: 4131 - protein, 4 aa, Bacillus subtilis
NTSA

SEQ ID NO: 4132 - protein, 6 aa, Bacillus subtilis
SHYASD

SEQ ID NO: 4133 - protein, 4 aa, Bacillus subtilis
QPEE

SEQ ID NO: 4134 - protein, 24 aa, Artificial Sequence
  Description of Artificial Sequence: Synthetic peptide
DYKDDDDKDYKDDDDKDYKDDDDK

SEQ ID NO: 4135 - protein, 7 aa, Artificial Sequence
  Description of Artificial Sequence: Synthetic peptide
DYKDDDK

SEQ ID NO: 4136 - protein, 10 aa, Artificial Sequence
  Description of Artificial Sequence: Synthetic peptide
MGSHHHHHHH
